(19) United States
(12) Patent Application Publication
(10) Pub. No.: US 2022/0389079 A1
(43) Pub. Date: Dec. 8, 2022

(54) MULTIMERIC T-CELL MODULATORY POLYPEPTIDES AND METHODS OF USE THEREOF

(71) Applicant: Cue Biopharma, Inc., Cambridge, MA (US)

(72) Inventors: Ronald D. Seidel, III, Cambridge, MA (US); Rodolfo J. Chaparro, Cambridge, MA (US)

(21) Appl. No.: 17/327,171

(22) Filed: May 21, 2021

Related U.S. Application Data
(63) Continuation of application No. PCT/US2019/067280, filed on Dec. 18, 2019.
(60) Provisional application No. 62/782,205, filed on Dec. 19, 2018.
(60) Provisional application No. 62/814,707, filed on Mar. 6, 2019.

(51) Int. Cl. C07K 14/74; C07K 14/55; A61K 45/06; A61K 38/17; A61K 38/20; G01N 33/50; C07K 14/005; A61K 39/12; C12N 7/00; C07K 14/47; A61K 39/00

(52) U.S. Cl. CPC C07K 14/70539; A61K 2039/585; A61K 45/06; A61K 38/1774; A61K 38/2013; G01N 33/505; C07K 14/005; A61K 39/12; C12N 7/00; C07K 14/4748; A61K 39/001153; A61K 39/001181; C07K 2319/30; C12N 2710/20033; C07K 14/55

(57) ABSTRACT

The present disclosure provides T-cell modulatory multimeric polypeptides that comprise an immunomodulatory polypeptide, an epitope-presenting peptide, and class I MHC polypeptides. A T-cell modulatory multimeric polypeptide is useful for modulating the activity of a T cell, and for modulating an immune response in an individual.

### CROSS-REFERENCE

[0001] This application claims the benefit of U.S. Provisional Patent Application No. 62/782,205, filed Dec. 19, 2018, and U.S. Provisional Patent Application No. 62/814,707, filed Mar. 6, 2019, which applications are incorporated herein by reference in their entirety.

### INTRODUCTION

[0002] An adaptive immune response involves the engagement of the T cell receptor (TCR), present on the surface of a T cell, with a small peptide antigen non-covalently presented on the surface of an antigen presenting cell (APC) by a major histocompatibility complex (MHC; also referred to in humans as a human leukocyte antigen (HLA) complex). This engagement represents the immune system's targeting mechanism and is a requisite molecular interaction for T cell modulation (activation or inhibition) and effector function. Following epitope-specific cell targeting, the targeted T cells are activated through engagement of costimulatory proteins found on the APC with counterpart costimulatory proteins the T cells. Both signals—epitope/TCR binding and engagement of APC costimulatory proteins with T cell costimulatory proteins—are required to drive T cell specificity and activation or inhibition. The TCR is specific for a given epitope; however, the costimulatory protein not epitope specific and instead is generally expressed on all T cells or on large T cell subsets.

### SUMMARY

[0003] The present disclosure provides T-cell modulatory multimeric polypeptides (TMMPs) that comprise an immunomodulatory polypeptide, class I HLA polypeptides (a class I HLA heavy chain polypeptide and a β2 microglobulin polypeptide), and a peptide that presents an epitope to a T-cell receptor. A TMMP is useful for modulating the activity of a T cell, and for modulating an immune response in an individual.

### BRIEF DESCRIPTION OF THE DRAWINGS

[0004] FIGS. 1A-1F are schematic depictions of various TMMPs of the present disclosure.

[0005] FIGS. 2A-2F are schematic depictions of various disulfide-linked TMMPs of the present disclosure.

[0006] FIGS. 3A-3G provide amino acid sequences of immunoglobulin Fc polypeptides. The sequences of FIGS. 5A-5G are set forth in SEQ ID NOs: 449-460, respectively.

[0007] FIG. 4 provides a multiple amino acid sequence alignment of beta-2 microglobulin (β2M) precursors (i.e., including the leader sequence) from Homo sapiens (NP_004039.1; SEQ ID NO:19), Pan troglodytes (NP_001009066.1; SEQ ID NO:19), Macaca mulatta (NP_001040602.1; SEQ ID NO:20), Bos taurus (NP_776318.1; SEQ ID NO:21) and Mus musculus (NP_033865.2; SEQ ID NO:22). Amino acids 1-20 are a signal peptide.

[0008] FIGS. 5A-5C provide amino acid sequences of full-length human HLA heavy chains of alleles A*0101 (SEQ ID NO: 23), A*1101 (SEQ ID NO: 24), A*2402 (SEQ ID NO: 25), and A*3303 (SEQ ID NO: 26) (FIG. 7A); full-length human HLA heavy chain of allele B*0702 (SEQ ID NO: 27) (FIG. 5B); and a full-length human HLA-C heavy chain (SEQ ID NO: 28) (FIG. 5C).

[0009] FIG. 6 provides an alignment of eleven mature MHC class I heavy chain amino acid sequences without their leader sequences, transmembrane domains, and intracellular domains. Top to bottom: SEQ ID NOs: 41-51.

[0010] FIGS. 7A-7B provide an alignment of HLA-A heavy chain amino acid sequences (FIG. 7A; SEQ ID NOs: 198-206, respectively) and a consensus sequence (FIG. 7B; SEQ ID NO: 29).

[0011] FIGS. 8A-8B provide an alignment of HLA-B heavy chain amino acid sequences (FIG. 8A; SEQ ID NOs: 207-213, respectively) and a consensus sequence (FIG. 8B; SEQ ID NO: 30).

[0012] FIGS. 9A-9B provide an alignment of HLA-C heavy chain amino acid sequences (FIG. 9A; SEQ ID NOs: 214-222, respectively) and a consensus sequence (FIG. 9B; SEQ ID NO: 31).

[0013] FIG. 10 provides a consensus amino acid sequence for each of HLA-E, —F, and -G heavy chains (SEQ ID NOs:32-34, respectively). Variable amino acid (aa) positions are indicated as “X” residues sequentially numbered; the locations of amino acids 84, 139, and 236 are double underlined.

[0014] FIG. 11 provides an alignment of consensus amino acid sequences for HLA-A (SEQ ID NO: 35), -B (SEQ ID NO: 36), -C(SEQ ID NO: 37), -E (SEQ ID NO: 38), -F (SEQ ID NO: 39), and -G (SEQ ID NO: 40).

[0015] FIG. 12A-12D provide schematic depictions of multiple disulfide-linked TMMP of the present disclosure.

[0016] FIG. 13A-13C provide schematic depictions of examples of configurations of disulfide-linked TMMPs of the present disclosure.

[0017] FIG. 14 provide schematic depictions of examples of positions of immunomodulatory polypeptides in TMMPs of the present disclosure.

### DEFINITIONS

[0018] The terms “polynucleotide” and “nucleic acid,” used interchangeably herein, refer to a polymeric form of nucleotides of any length, either ribonucleotides or deoxyribonucleotides. Thus, this term includes, but is not limited to, single-, double-, or multi-stranded DNA or RNA, genomic DNA, cDNA, DNA-RNA hybrids, or a polymer comprising purine and pyrimidine bases or other natural, chemically or biochemically modified, non-natural, or derivatized nucleotide bases.

[0019] The terms “peptide,” “polypeptide,” and “protein” are used interchangeably herein, and refer to a polymeric form of amino acids of any length, which can include coded and non-coded amino acids, chemically or biochemically modified or derivatized amino acids, and polypeptides having modified peptide backbones.

[0020] A polynucleotide or polypeptide has a certain percent “sequence identity” to another polynucleotide or polypeptide, meaning that, when aligned, that percentage of bases or amino acids are the same, and in the same relative position, when comparing the two sequences. Sequence identity can be determined in a number of different ways. To determine sequence identity, sequences can be aligned using various convenient methods and computer programs (e.g., BLAST, T-COFFEE, MUSCLE, MAFFT, etc.), available over the world wide web at sites including ncbi.nlm.nili.gov/BLAST, ebi.ac.uk/Tools/msa/tcoffee/, ebi.ac.uk/Tools/msa/muscle/, mafft.cbrc.jp/alignment/software/. See, e.g., Altschul et al. (1990), J. Mol. Bioi. 215:403-10.

[0021] The term “conservative amino acid substitution” refers to the interchangeability in proteins of amino acid residues having similar side chains. For example, a group of amino acids having aliphatic side chains consists of glycine, alanine, valine, leucine, and isoleucine; a group of amino acids having aliphatic-hydroxyl side chains consists of serine and threonine; a group of amino acids having amide containing side chains consisting of asparagine and glutamine; a group of amino acids having aromatic side chains consists of phenylalanine, tyrosine, and tryptophan; a group of amino acids having basic side chains consists of lysine, arginine, and histidine; a group of amino acids having acidic side chains consists of glutamate and aspartate; and a group of amino acids having sulfur containing side chains consists of cysteine and methionine. Exemplary conservative amino acid substitution groups are: valine-leucine-isoleucine, phenylalanine-tyrosine, lysine-arginine, alanine-valine-glycine, and asparagine-glutamine.

[0022] The term “immunological synapse” or “immune synapse” as used herein generally refers to the natural interface between two interacting immune cells of an adaptive immune response including, e.g., the interface between an antigen-presenting cell (APC) or target cell and an effector cell, e.g., a lymphocyte, an effector T cell, a natural killer cell, and the like. An immunological synapse between an APC and a T cell is generally initiated by the interaction of a T cell antigen receptor and major histocompatibility complex molecules, e.g., as described in Bromley et al., Annu Rev Immunol. 2001; 19:375-96; the disclosure of which is incorporated herein by reference in its entirety.

[0023] “T cell” includes all types of immune cells expressing CD3, including T-helper cells (CD4⁺ cells), cytotoxic T-cells (CD8⁺ cells), T-regulatory cells (Treg), and NK-T cells.

[0024] The term “immunomodulatory polypeptide” (also referred to as a “co-stimulatory polypeptide”), as used herein, includes a polypeptide on an antigen presenting cell (APC) (e.g., a dendritic cell, a B cell, and the like) that specifically binds a cognate co-immunomodulatory polypeptide on a T cell, thereby providing a signal which, in addition to the primary signal provided by, for instance, binding of a TCR/CD3 complex with a major histocompatibility complex (MHC) polypeptide loaded with peptide, mediates a T cell response, including, but not limited to, proliferation, activation, differentiation, and the like. An immunomodulatory polypeptide can include, but is not limited to, CD7, B7-1 (CD80), B7-2 (CD86), PD-L1, PD-L2, 4-1BBL, OX40L, Fas ligand (FasL), inducible costimulatory ligand (ICOS-L), intercellular adhesion molecule (ICAM), CD30L, CD40, CD70, CD83, HLA-G, MICA, MICB, HVEM, lymphotoxin beta receptor, 3/TR6, ILT3, ILT4, HVEM, an agonist or antibody that binds Toll ligand receptor and a ligand that specifically binds with B7-H3.

[0025] As noted above, an “immunomodulatory polypeptide” (also referred to herein as a “MOD”) specifically binds a cognate co-immunomodulatory polypeptide on a T cell.

[0026] An “immunomodulatory domain” (“MOD”) of a TMMP of the present disclosure binds a cognate co-immunomodulatory polypeptide, which may be present on a target T cell.

[0027] “Heterologous,” as used herein, means a nucleotide or polypeptide that is not found in the native nucleic acid or protein, respectively.

[0028] “Recombinant,” as used herein, means that a particular nucleic acid (DNA or RNA) is the product of various combinations of cloning, restriction, polymerase chain reaction (PCR) and/or ligation steps resulting in a construct having a structural coding or non-coding sequence distinguishable from endogenous nucleic acids found in natural systems. DNA sequences encoding polypeptides can be assembled from cDNA fragments or from a series of synthetic oligonucleotides, to provide a synthetic nucleic acid which is capable of being expressed from a recombinant transcriptional unit contained in a cell or in a cell-free transcription and translation system.

[0029] The terms “recombinant expression vector,” or “DNA construct” are used interchangeably herein to refer to a DNA molecule comprising a vector and at least one insert. Recombinant expression vectors are usually generated for the purpose of expressing and/or propagating the insert(s), or for the construction of other recombinant nucleotide sequences. The insert(s) may or may not be operably linked to a promoter sequence and may or may not be operably linked to DNA regulatory sequences.

[0030] As used herein, the term “affinity” refers to the equilibrium constant for the reversible binding of two agents (e.g., an antibody and an antigen) and is expressed as a dissociation constant (K_{D}). Affinity can be at least 1-fold greater, at least 2-fold greater, at least 3-fold greater, at least 4-fold greater, at least 5-fold greater, at least 6-fold greater, at least 7-fold greater, at least 8-fold greater, at least 9-fold greater, at least 10-fold greater, at least 20-fold greater, at least 30-fold greater, at least 40-fold greater, at least 50-fold greater, at least 60-fold greater, at least 70-fold greater, at least 80-fold greater, at least 90-fold greater, at least 100-fold greater, or at least 1,000-fold greater, or more, than the affinity of an antibody for unrelated amino acid sequences. Affinity of an antibody to a target protein can be, for example, from about 100 nanomolar (nM) to about 0.1 nM, from about 100 nM to about 1 picomolar (pM), or from about 100 nM to about 1 femtomolar (fM) or more. As used herein, the term “avidity” refers to the resistance of a complex of two or more agents to dissociation after dilution. The terms “immunoreactive” and “preferentially binds” are used interchangeably herein with respect to antibodies and/or antigen-binding fragments.

[0031] The term “binding,” as used herein (e.g. with reference to binding of a TMMP to a polypeptide (e.g., a T-cell receptor) on a T cell), refers to a non-covalent interaction between two molecules. Non-covalent binding refers to a direct association between two molecules, due to, for example, electrostatic, hydrophobic, ionic, and/or hydrogen-bond interactions, including interactions such as salt bridges and water bridges. Non-covalent binding interactions are generally characterized by a dissociation constant (K_{D}) of less than 10⁻⁶ M, less than 10⁻⁷ M, less than 10⁻⁸ M, less than 10⁻⁹ M, less than 10⁻¹⁰ M, less than 10⁻¹¹ M, less than 10⁻¹² M, less than 10⁻¹³ M, less than 10⁻¹⁴ M, or less than 10⁻¹⁵ M. “Affinity” refers to the strength of non-covalent binding, increased binding affinity being correlated with a lower K_{D}. “Specific binding” generally refers to binding with an affinity of at least about 10⁻⁷ M or greater, e.g., 5×10⁻⁷ M, 10⁻⁸ M, 5×10⁻⁸M, 10⁻⁹ M, and greater. “Non-specific binding” generally refers to binding (e.g., the binding of a ligand to a moiety other than its designated binding site or receptor) with an affinity of less than about 10⁻⁷ M (e.g., binding with an affinity of 10⁻⁶ M, 10⁻⁵ M, 10⁻⁴ M). However, in some contexts, e.g., binding between a TCR and a peptide/MHC complex, “specific binding” can be in the range of from 1 μM to 100 μM, or from 100 μM to 1 mM. “Covalent binding” or “covalent bond,” as used herein, refers to the formation of one or more covalent chemical binds between two different molecules.

[0032] The terms “treatment”, “treating” and the like are used herein to generally mean obtaining a desired pharmacologic and/or physiologic effect. The effect may be prophylactic in terms of completely or partially preventing a disease or symptom thereof and/or may be therapeutic in terms of a partial or complete cure for a disease and/or adverse effect attributable to the disease. “Treatment” as used herein covers any treatment of a disease or symptom in a mammal, and includes: (a) preventing the disease or symptom from occurring in a subject which may be predisposed to acquiring the disease or symptom but has not yet been diagnosed as having it; (b) inhibiting the disease or symptom, i.e., arresting its development; and/or (c) relieving the disease, i.e., causing regression of the disease. The therapeutic agent may be administered before, during or after the onset of disease or injury. The treatment of ongoing disease, where the treatment stabilizes or reduces the undesirable clinical symptoms of the patient, is of particular interest. Such treatment is desirably performed prior to complete loss of function in the affected tissues. The subject therapy will desirably be administered during the symptomatic stage of the disease, and in some cases after the symptomatic stage of the disease.

[0033] The terms “individual,” “subject,” “host,” and “patient,” are used interchangeably herein and refer to any mammalian subject for whom diagnosis, treatment, or therapy is desired. Mammals include, e.g., humans, non-human primates, rodents (e.g., rats; mice), lagomorphs (e.g., rabbits), ungulates (e.g., cows, sheep, pigs, horses, goats, and the like), etc.

[0034] Before the present invention is further described, it is to be understood that this invention is not limited to particular embodiments described, as such may, of course, vary. It is also to be understood that the terminology used herein is for the purpose of describing particular embodiments only, and is not intended to be limiting, since the scope of the present invention will be limited only by the appended claims.

[0035] Where a range of values is provided, it is understood that each intervening value, to the tenth of the unit of the lower limit unless the context clearly dictates otherwise, between the upper and lower limit of that range and any other stated or intervening value in that stated range, is encompassed within the invention. The upper and lower limits of these smaller ranges may independently be included in the smaller ranges, and are also encompassed within the invention, subject to any specifically excluded limit in the stated range. Where the stated range includes one or both of the limits, ranges excluding either or both of those included limits are also included in the invention.

[0036] Unless defined otherwise, all technical and scientific terms used herein have the same meaning as commonly understood by one of ordinary skill in the art to which this invention belongs. Although any methods and materials similar or equivalent to those described herein can also be used in the practice or testing of the present invention, the preferred methods and materials are now described. All publications mentioned herein are incorporated herein by reference to disclose and describe the methods and/or materials in connection with which the publications are cited.

[0037] It must be noted that as used herein and in the appended claims, the singular forms “a,” “an,” and “the” include plural referents unless the context clearly dictates otherwise. Thus, for example, reference to a “T-cell modulatory multimeric polypeptide” includes a plurality of such polypeptides and reference to “the immunomodulatory polypeptide” includes reference to one or more immunomodulatory polypeptides and equivalents thereof known to those skilled in the art, and so forth. It is further noted that the claims may be drafted to exclude any optional element. As such, this statement is intended to serve as antecedent basis for use of such exclusive terminology as “solely,” “only” and the like in connection with the recitation of claim elements, or use of a “negative” limitation.

[0038] It is appreciated that certain features of the invention, which are, for clarity, described in the context of separate embodiments, may also be provided in combination in a single embodiment. Conversely, various features of the invention, which are, for brevity, described in the context of a single embodiment, may also be provided separately or in any suitable sub-combination. All combinations of the embodiments pertaining to the invention are specifically embraced by the present invention and are disclosed herein just as if each and every combination was individually and explicitly disclosed. In addition, all sub-combinations of the various embodiments and elements thereof are also specifically embraced by the present invention and are disclosed herein just as if each and every such sub-combination was individually and explicitly disclosed herein.

[0039] The publications discussed herein are provided solely for their disclosure prior to the filing date of the present application. Nothing herein is to be construed as an admission that the present invention is not entitled to antedate such publication by virtue of prior invention. Further, the dates of publication provided may be different from the actual publication dates which may need to be independently confirmed.

### DETAILED DESCRIPTION

[0040] The present disclosure provides T-cell modulatory multimeric polypeptides that comprise an immunomodulatory polypeptide and that comprise an epitope-presenting peptide. A TMMP is useful for modulating the activity of a T cell, and for modulating an immune response in an individual.

### T-Cell Modulatory Multimeric Polypeptides

[0041] The present disclosure provides a T-cell modulatory multimeric polypeptide (TMMP) comprising: a) a first polypeptide; and b) a second polypeptide, wherein the TMMP comprises an epitope; a first major histocompatibility complex (MHC) polypeptide; a second MHC polypeptide; one or more immunomodulatory polypeptides; and optionally an immunoglobulin (Ig) Fc polypeptide or a non-Ig scaffold. The present disclosure provides a TMMP, wherein the TMMP is a heterodimer comprising: a) a first polypeptide comprising a first MHC polypeptide; and b) a second polypeptide comprising a second MHC polypeptide, wherein the first polypeptide or the second polypeptide comprises an epitope (e.g., a peptide that presents an epitope); wherein the first polypeptide and/or the second polypeptide comprises one or more immunomodulatory polypeptides that can be the same or different; and optionally an Ig F c polypeptide or a non-Ig scaffold. A TMMP of the present disclosure is also referred to herein as a “multimeric polypeptide of the present disclosure” or a “synTac.” In some cases, the peptide epitope present in a TMMP of the present disclosure is a cancer-associated peptide. In some cases, the peptide epitope present in a TMMP of the present disclosure is an infectious disease-associated peptide (e.g., a virus-encoded peptide).

[0042] The present disclosure provides a TMMP comprising a heterodimeric polypeptide comprising: a) a first polypeptide comprising: i) a peptide epitope; and ii) a first MHC polypeptide; b) a second polypeptide comprising a second MHC polypeptide; and c) at least one immunomodulatory polypeptide, where the first and/or the second polypeptide comprises the at least one (i.e., one or more) immunomodulatory polypeptide. Optionally, the first or the second polypeptide comprises an Ig Fc polypeptide or a non-Ig scaffold. At least one of the one or more immunomodulatory polypeptides is a variant immunomodulatory polypeptide that exhibits reduced affinity to a cognate co-immunomodulatory polypeptide compared to the affinity of a corresponding wild-type immunomodulatory polypeptide for the cognate co-immunomodulatory polypeptide. The epitope present in a TMMP of the present disclosure binds to a T-cell receptor (TCR) on a T cell with an affinity of at least 100 μM (e.g., at least 10 μM, at least 1 μM, at least 100 nM, at least 10 nM, or at least 1 nM). A TMMP of the present disclosure binds to a first T cell with an affinity that is at least 25% higher than the affinity with which the TMMP binds a second T cell, where the first T cell expresses on its surface the cognate co-immunomodulatory polypeptide and a TCR that binds the epitope with an affinity of at least 100 μM, and where the second T cell expresses on its surface the cognate co-immunomodulatory polypeptide but does not express on its surface a TCR that binds the epitope with an affinity of at least 100 μM (e.g., at least 10 μM, at least 1 μM, at least 100 nM, at least 10 nM, or at least 1 nM). In some cases, the peptide epitope present in a TMMP of the present disclosure is a cancer-associated peptide. In some cases, the peptide epitope present in a TMMP of the present disclosure is an infectious disease-associated peptide (e.g., a virus-encoded peptide).

[0043] The present disclosure provides a TMMP, wherein the TMMP is:

[0044] A) a heterodimer comprising: a) a first polypeptide comprising a first MHC polypeptide; and b) a second polypeptide comprising a second MHC polypeptide, wherein the first polypeptide or the second polypeptide comprises an epitope (e.g., a peptide that comprises an epitope recognized by a T cell); wherein the first polypeptide and/or the second polypeptide comprises one or more immunomodulatory polypeptides that can be the same or different, and wherein at least one of the one or more immunomodulatory polypeptides may be a wild-type immunomodulatory polypeptide or a variant of a wild-type immunomodulatory polypeptide, wherein the variant immunomodulatory polypeptide comprises 1, 2, 3, 4, 5, 6, 7, 8, 9, 10, 11, 12, 13, 14, 15, 16, 17, 18, 19, or 20 amino acid substitutions compared to the amino acid sequence of the corresponding wild-type immunomodulatory polypeptide; and wherein the first polypeptide or the second polypeptide optionally comprises an Ig Fc polypeptide or a non-Ig scaffold; or

[0045] B) a heterodimer comprising: a) a first polypeptide comprising a first MHC polypeptide; and b) a second polypeptide comprising a second MHC polypeptide, wherein the first polypeptide or the second polypeptide comprises an epitope; wherein the first polypeptide and/or the second polypeptide comprises one or more immunomodulatory polypeptides that can be the same or different,

[0046] wherein at least one of the one or more immunomodulatory polypeptides is a variant of a wild-type immunomodulatory polypeptide, wherein the variant immunomodulatory polypeptide comprises 1, 2, 3, 4, 5, 6, 7, 8, 9, 10, 11, 12, 13, 14, 15, 16, 17, 18, 19, or 20 amino acid substitutions compared to the amino acid sequence of the corresponding wild-type immunomodulatory polypeptide,

[0047] wherein at least one of the one or more immunomodulatory domains is a variant immunomodulatory polypeptide that exhibits reduced affinity to a cognate co-immunomodulatory polypeptide compared to the affinity of a corresponding wild-type immunomodulatory polypeptide for the cognate co-immunomodulatory polypeptide, and wherein the epitope binds to a TCR on a T cell with an affinity of at least 10⁻⁷ M, such that: i) the TMMP polypeptide binds to a first T cell with an affinity that is at least 25% higher than the affinity with which the TMMP binds a second T cell, wherein the first T cell expresses on its surface the cognate co-immunomodulatory polypeptide and a TCR that binds the epitope with an affinity of at least 10⁻⁷ M, and wherein the second T cell expresses on its surface the cognate co-immunomodulatory polypeptide but does not express on its surface a TCR that binds the epitope with an affinity of at least 10⁻⁷ M; and/or ii) the ratio of the binding affinity of a control TMMP, wherein the control comprises a wild-type immunomodulatory polypeptide, to a cognate co-immunomodulatory polypeptide to the binding affinity of the TMMP comprising a variant of the wild-type immunomodulatory polypeptide to the cognate co-immunomodulatory polypeptide, when measured by bio-layer interferometry, is in a range of from 1.5:1 to 10⁶:1; and wherein the variant immunomodulatory polypeptide comprises 1, 2, 3, 4, 5, 6, 7, 8, 9, 10, 11, 12, 13, 14, 15, 16, 17, 18, 19, or 20 amino acid substitutions compared to the amino acid sequence of the corresponding wild-type immunomodulatory polypeptide; and

[0048] wherein the first polypeptide or the second polypeptide optionally comprises an Ig Fc polypeptide or a non-Ig scaffold; or

[0049] C) a heterodimer comprising: a) a first polypeptide comprising, in order from N-terminus to C-terminus: i) an epitope; ii) a first MHC polypeptide; and b) a second polypeptide comprising, in order from N-terminus to C-terminus: i) a second MHC polypeptide; and ii) optionally an immunoglobulin (Ig) Fc polypeptide or a non-Ig scaffold, wherein the TMMP comprises one or more immunomodulatory domains that can be the same or different, wherein at least one of the one or more immunomodulatory domain is: A) at the C-terminus of the first polypeptide; B) at the N-terminus of the second polypeptide; C) at the C-terminus of the second polypeptide; or D) at the C-terminus of the first polypeptide and at the N-terminus of the second polypeptide, and wherein at least one of the one or more immunomodulatory domains may be a wild-type immunomodulatory polypeptide or a variant of a wild-type immunomodulatory polypeptide, wherein the variant immunomodulatory polypeptide comprises 1, 2, 3, 4, 5, 6, 7, 8, 9, 10, 11, 12, 13, 14, 15, 16, 17, 18, 19, or 20 amino acid substitutions compared to the amino acid sequence of the corresponding wild-type immunomodulatory polypeptide; and

[0050] optionally wherein at least one of the one or more immunomodulatory domains is a variant immunomodulatory polypeptide that exhibits reduced affinity to a cognate co-immunomodulatory polypeptide compared to the affinity of a corresponding wild-type immunomodulatory polypeptide for the cognate co-immunomodulatory polypeptide, and wherein the epitope binds to a TCR on a T cell with an affinity of at least 10⁻⁷ M, such that: i) the TMMP binds to a first T cell with an affinity that is at least 25% higher than the affinity with which the TMMP binds a second T cell, wherein the first T cell expresses on its surface the cognate co-immunomodulatory polypeptide and a TCR that binds the epitope with an affinity of at least 10⁻⁷ M, and wherein the second T cell expresses on its surface the cognate co-immunomodulatory polypeptide but does not express on its surface a TCR that binds the epitope with an affinity of at least 10⁻⁷ M; and/or ii) the ratio of the binding affinity of a control TMMP, wherein the control comprises a wild-type immunomodulatory polypeptide, to a cognate co-immunomodulatory polypeptide to the binding affinity of the TMMP comprising a variant of the wild-type immunomodulatory polypeptide to the cognate co-immunomodulatory polypeptide, when measured by bio-layer interferometry, is in a range of from 1.5:1 to 10⁶:1; and wherein the variant immunomodulatory polypeptide comprises 1, 2, 3, 4, 5, 6, 7, 8, 9, 10, 11, 12, 13, 14, 15, 16, 17, 18, 19, or 20 amino acid substitutions compared to the amino acid sequence of the corresponding wild-type immunomodulatory polypeptide. In some cases, the peptide epitope present in a TMMP of the present disclosure is a cancer-associated peptide. In some cases, the peptide epitope present in a TMMP of the present disclosure is an infectious disease-associated peptide (e.g., a virus-encoded peptide).

[0051] The present disclosure provides a TMMP comprising: a) a first polypeptide comprising, in order from N-terminus to C-terminus: i) an epitope; ii) a first MHC polypeptide; and b) a second polypeptide comprising, in order from N-terminus to C-terminus: i) a second MHC polypeptide; and ii) optionally an Ig Fc polypeptide or a non-Ig scaffold. A TMMP of the present disclosure comprises one or more immunomodulatory polypeptides, wherein at least one of the one or more immunomodulatory polypeptides is: A) at the C-terminus of the first polypeptide; B) at the N-terminus of the second polypeptide; C) at the C-terminus of the second polypeptide; or D) at the C-terminus of the first polypeptide and at the N-terminus of the second polypeptide. At least one of the one or more immunomodulatory polypeptides is a variant immunomodulatory polypeptide that exhibits reduced affinity to a cognate co-immunomodulatory polypeptide compared to the affinity of a corresponding wild-type immunomodulatory polypeptide for the cognate co-immunomodulatory polypeptide. The epitope present in a TMMP of the present disclosure binds to a T-cell receptor (TCR) on a T cell with an affinity of at least 100 μM (e.g., at least 10 μM, at least 1 μM, at least 100 nM, at least 10 nM, or at least 1 nM). A TMMP of the present disclosure binds to a first T cell with an affinity that is at least 25% higher than the affinity with which the TMMP binds a second T cell, where the first T cell expresses on its surface the cognate co-immunomodulatory polypeptide and a TCR that binds the epitope with an affinity of at least 100 μM, and where the second T cell expresses on its surface the cognate co-immunomodulatory polypeptide but does not express on its surface a TCR that binds the epitope with an affinity of at least 100 μM (e.g., at least 10 μM, at least 1 μM, at least 100 nM, at least 10 nM, or at least 1 nM).

[0052] In some cases, the epitope present in a TMMP of the present disclosure binds to a TCR on a T cell with an affinity of from about 10⁻⁴M to about 5×10⁻⁴ M, from about 5×10⁻⁴ M to about 10⁻⁵ M, from about 10⁻⁵ M to 5×10⁻⁵ M, from about 5×10⁻⁵ M to 10⁻⁶ M, from about 10⁻⁶ M to about 5×10⁻⁶ M, from about 5×10⁻⁶ M to about 10⁻⁷ M, from about 10⁻⁷ M to about 5×10⁻⁷ M, from about 5×10⁻⁷ M to about 10⁻⁸M, or from about 10⁻⁸M to about 10⁻⁹ M. Expressed another way, in some cases, the epitope present in a TMMP of the present disclosure binds to a TCR on a T cell with an affinity of from about 1 nM to about 5 nM, from about 5 nM to about 10 nM, from about 10 nM to about 50 nM, from about 50 nM to about 100 nM, from about 0.1 μM to about 0.5 μM, from about 0.5 μM to about 1 μM, from about 1 μM to about 5 μM, from about 5 μM to about 10 μM, from about 10 μM to about 25 μM, from about 25 μM to about 50 μM, from about 50 μM to about 75 μM, from about 75 μM to about 100 μM.

[0053] An immunomodulatory polypeptide present in a TMMP of the present disclosure binds to its cognate co-immunomodulatory polypeptide with an affinity that it at least 10% less, at least 15% less, at least 20% less, at least 25% less, at least 30% less, at least 35% less, at least 40% less, at least 45% less, at least 50% less, at least 55% less, at least 60% less, at least 65% less, at least 70% less, at least 75% less, at least 80% less, at least 85% less, at least 90% less, at least 95% less, or more than 95% less, than the affinity of a corresponding wild-type immunomodulatory polypeptide for the cognate co-immunomodulatory polypeptide.

[0054] In some cases, a variant immunomodulatory polypeptide present in a TMMP of the present disclosure has a binding affinity for a cognate co-immunomodulatory polypeptide that is from 1 nM to 100 nM, or from 100 nM to 100 μM. For example, in some cases, a variant immunomodulatory polypeptide present in a TMMP of the present disclosure has a binding affinity for a cognate co-immunomodulatory polypeptide that is from about 100 nM to 150 nM, from about 150 nM to about 200 nM, from about 200 nM to about 250 nM, from about 250 nM to about 300 nM, from about 300 nM to about 350 nM, from about 350 nM to about 400 nM, from about 400 nM to about 500 nM, from about 500 nM to about 600 nM, from about 600 nM to about 700 nM, from about 700 nM to about 800 nM, from about 800 nM to about 900 nM, from about 900 nM to about 1 μM, to about 1 μM to about 5 μM, from about 5 μM to about 10 μM, from about 10 μM to about 15 μM, from about 15 μM to about 20 μM, from about 20 μM to about 25 μM, from about 25 μM to about 50 μM, from about 50 μM to about 75 μM, or from about 75 μM to about 100 μM. In some cases, a variant immunomodulatory polypeptide present in a TMMP of the present disclosure has a binding affinity for a cognate co-immunomodulatory polypeptide that is from about 1 nM to about 5 nM, from about 5 nM to about 10 nM, from about 10 nM to about 50 nM, from about 50 nM to about 100 nM.

[0055] The combination of the reduced affinity of the immunomodulatory polypeptide for its cognate co-immunomodulatory polypeptide, and the affinity of the epitope for a TCR, provides for enhanced selectivity of a TMMP of the present disclosure. For example, a TMMP of the present disclosure binds selectively to a first T cell that displays both: i) a TCR specific for the epitope present in the TMMP; and ii) a co-immunomodulatory polypeptide that binds to the immunomodulatory polypeptide present in the TMMP, compared to binding to a second T cell that displays: i) a TCR specific for an epitope other than the epitope present in the TMMP; and ii) a co-immunomodulatory polypeptide that binds to the immunomodulatory polypeptide present in the TMMP. For example, a TMMP of the present disclosure binds to the first T cell with an affinity that is at least 10%, at least 15%, at least 20%, at least 25%, at least 30%, at least 40%, at least 50%, at least 60%, at least 70%, at least 80%, at least 90%, at least 2-fold, at least 2.5-fold, at least 5-fold, at least 10-fold, at least 15-fold, at least 20-fold, at least 25-fold, at least 50-fold, at least 100-fold, or more than 100-fold, higher than the affinity to which it binds the second T cell.

[0056] In some cases, a TMMP of the present disclosure, when administered to an individual in need thereof, induces both an epitope-specific T cell response and an epitope non-specific T cell response. In other words, in some cases, a TMMP of the present disclosure, when administered to an individual in need thereof, induces an epitope-specific T cell response by modulating the activity of a first T cell that displays both: i) a TCR specific for the epitope present in the TMMP; ii) a co-immunomodulatory polypeptide that binds to the immunomodulatory polypeptide present in the TMMP; and induces an epitope non-specific T cell response by modulating the activity of a second T cell that displays: i) a TCR specific for an epitope other than the epitope present in the TMMP; and ii) a co-immunomodulatory polypeptide that binds to the immunomodulatory polypeptide present in the TMMP. The ratio of the epitope-specific T cell response to the epitope-non-specific T cell response is at least 2:1, at least 5:1, at least 10:1, at least 15:1, at least 20:1, at least 25:1, at least 50:1, or at least 100:1. The ratio of the epitope-specific T cell response to the epitope-non-specific T cell response is from about 2:1 to about 5:1, from about 5:1 to about 10:1, from about 10:1 to about 15:1, from about 15:1 to about 20:1, from about 20:1 to about 25:1, from about 25:1 to about 50:1, or from about 50:1 to about 100:1, or more than 100:1. “Modulating the activity” of a T cell can include one or more of: i) activating a cytotoxic (e.g., CD8⁺) T cell; ii) inducing cytotoxic activity of a cytotoxic (e.g., CD8⁺) T cell; iii) inducing production and release of a cytotoxin (e.g., a perforin; a granzyme; a granulysin) by a cytotoxic (e.g., CD8⁺) T cell; iv) inhibiting activity of an autoreactive T cell; and the like.

[0057] The combination of the reduced affinity of the immunomodulatory polypeptide for its cognate co-immunomodulatory polypeptide, and the affinity of the epitope for a TCR, provides for enhanced selectivity of a TMMP of the present disclosure. Thus, for example, a TMMP of the present disclosure binds with higher avidity to a first T cell that displays both: i) a TCR specific for the epitope present in the TMMP; and ii) a co-immunomodulatory polypeptide that binds to the immunomodulatory polypeptide present in the TMMP, compared to the avidity to which it binds to a second T cell that displays: i) a TCR specific for an epitope other than the epitope present in the TMMP; and ii) a co-immunomodulatory polypeptide that binds to the immunomodulatory polypeptide present in the TMMP.

[0058] Binding affinity between an immunomodulatory polypeptide and its cognate co-immunomodulatory polypeptide can be determined by bio-layer interferometry (BLI) using purified immunomodulatory polypeptide and purified cognate co-immunomodulatory polypeptide. Binding affinity between a TMMP and its cognate co-immunomodulatory polypeptide can be determined by BLI using purified TMMP and the cognate co-immunomodulatory polypeptide. BLI methods are well known to those skilled in the art. See, e.g., Lad et al. (2015) J. Biomol. Screen. 20(4):498-507; and Shah and Duncan (2014) J. Vis. Exp. 18:e51383.

[0059] A BLI assay can be carried out using an Octet RED 96 (Pal FortéBio) instrument, or a similar instrument, as follows. A TMMP (e.g., a TMMP of the present disclosure; a control TMMP (where a control TMMP comprises a wild-type immunomodulatory polypeptide)) is immobilized onto an insoluble support (a “biosensor”). The immobilized TMMP is the “target” Immobilization can be effected by immobilizing a capture antibody onto the insoluble support, where the capture antibody immobilizes the TMMP. For example, immobilization can be effected by immobilizing anti-Fc (e.g., anti-human IgG Fc) antibodies onto the insoluble support, where the immobilized anti-Fc antibodies bind to and immobilize the TMMP (where the TMMP comprises an IgFc polypeptide). A co-immunomodulatory polypeptide is applied, at several different concentrations, to the immobilized TMMP, and the instrument's response recorded. Assays are conducted in a liquid medium comprising 25 mM HEPES pH 6.8, 5% poly(ethylene glycol) 6000, 50 mM KCl, 0.1% bovine serum albumin, and 0.02% Tween 20 nonionic detergent. Binding of the co-immunomodulatory polypeptide to the immobilized TMMP is conducted at 30° C. As a positive control for binding affinity, an anti-MHC Class I monoclonal antibody can be used. For example, anti-HLA Class I monoclonal antibody W6/32 (American Type Culture Collection No. HB-95; Parham et al. (1979) J. Immunol. 123:342), which has a K_{D} of 7 nM, can be used. A standard curve can be generated using serial dilutions of the anti-MHC Class I monoclonal antibody. The co-immunomodulatory polypeptide, or the anti-MHC Class I mAb, is the “analyte.” BLI analyzes the interference pattern of white light reflected from two surfaces: i) from the immobilized polypeptide (“target”); and ii) an internal reference layer. A change in the number of molecules (“analyte”; e.g., co-immunomodulatory polypeptide; anti-HLA antibody) bound to the biosensor tip causes a shift in the interference pattern; this shift in interference pattern can be measured in real time. The two kinetic terms that describe the affinity of the target/analyte interaction are the association constant (kₐ) and dissociation constant (k_{d}). The ratio of these two terms (k_{d/a}) gives rise to the affinity constant K_{D}.

[0060] The BLI assay is carried out in a multi-well plate. To run the assay, the plate layout is defined, the assay steps are defined, and biosensors are assigned in Octet Data Acquisition software. The biosensor assembly is hydrated. The hydrated biosensor assembly and the assay plate are equilibrated for 10 minutes on the Octet instrument. Once the data are acquired, the acquired data are loaded into the Octet Data Analysis software. The data are processed in the Processing window by specifying method for reference subtraction, y-axis alignment, inter-step correction, and Savitzky-Golay filtering. Data are analyzed in the Analysis window by specifying steps to analyze (Association and Dissociation), selecting curve fit model (1:1), fitting method (global), and window of interest (in seconds). The quality of fit is evaluated. K_{D} values for each data trace (analyte concentration) can be averaged if within a 3-fold range. K_{D} error values should be within one order of magnitude of the affinity constant values; R² values should be above 0.95. See, e.g., Abdiche et al. (2008) J. Anal. Biochem. 377:209.

[0061] Unless otherwise stated herein, the affinity of a TMMP of the present disclosure for a cognate co-immunomodulatory polypeptide, or the affinity of a control TMMP (where a control TMMP comprises a wild-type immunomodulatory polypeptide) for a cognate co-immunomodulatory polypeptide, is determined using BLI, as described above.

[0062] In some cases, the ratio of: i) the binding affinity of a control TMMP (where the control comprises a wild-type immunomodulatory polypeptide) to a cognate co-immunomodulatory polypeptide to ii) the binding affinity of a TMMP of the present disclosure comprising a variant of the wild-type immunomodulatory polypeptide to the cognate co-immunomodulatory polypeptide, when measured by BLI (as described above), is at least 1.5:1, at least 2:1, at least 5:1, at least 10:1, at least 15:1, at least 20:1, at least 25:1, at least 50:1, at least 100:1, at least 500:1, at least 10²:1, at least 5×10²:1, at least 10³:1, at least 5×10³:1, at least 10⁴:1, at least 10⁵:1, or at least 10⁶:1. In some cases, the ratio of: i) the binding affinity of a control TMMP (where the control comprises a wild-type immunomodulatory polypeptide) to a cognate co-immunomodulatory polypeptide to ii) the binding affinity of a TMMP of the present disclosure comprising a variant of the wild-type immunomodulatory polypeptide to the cognate co-immunomodulatory polypeptide, when measured by BLI, is in a range of from 1.5:1 to 10⁶:1, e.g., from 1.5:1 to 10:1, from 10:1 to 50:1, from 50:1 to 10²:1, from 10²:1 to 10³:1, from 10³:1 to 10⁴:1, from 10⁴:1 to 10⁵:1, or from 10⁵:1 to 10⁶:1.

[0063] As an example, where a control TMMP comprises a wild-type IL-2 polypeptide, and where a TMMP of the present disclosure comprises a variant IL-2 polypeptide (comprising from 1 to 10 amino acid substitutions relative to the amino acid sequence of the wild-type IL-2 polypeptide) as the immunomodulatory polypeptide, the ratio of: i) the binding affinity of the control TMMP to an IL-2 receptor (i.e., the cognate co-immunomodulatory polypeptide) to ii) the binding affinity of the TMMP of the present disclosure to the IL-2 receptor, when measured by BLI, is at least 1.5:1, at least 2:1, at least 5:1, at least 10:1, at least 15:1, at least 20:1, at least 25:1, at least 50:1, at least 100:1, at least 500:1, at least 10²:1, at least 5×10²:1, at least 10³:1, at least 5×10³:1, at least 10⁴:1, at least 10⁵:1, or at least 10⁶:1. In some cases, where a control TMMP comprises a wild-type IL-2 polypeptide, and where a TMMP of the present disclosure comprises a variant IL-2 polypeptide (comprising from 1 to 10 amino acid substitutions relative to the amino acid sequence of the wild-type IL-2 polypeptide) as the immunomodulatory polypeptide, the ratio of: i) the binding affinity of the control TMMP to an IL-2 receptor (i.e., the cognate co-immunomodulatory polypeptide) to ii) the binding affinity of the TMMP of the present disclosure to the IL-2 receptor, when measured by BLI, is in a range of from 1.5:1 to 10⁶:1, e.g., from 1.5:1 to 10:1, from 10:1 to 50:1, from 50:1 to 10²:1, from 10²:1 to 10³:1, from 10³:1 to 10⁴:1, from 10⁴:1 to 10⁵:1, or from 10⁵:1 to 10⁶:1.

[0064] As another example, where a control TMMP comprises a wild-type PD-L1 polypeptide, and where a TMMP of the present disclosure comprises a variant PD-L1 polypeptide (comprising from 1 to 10 amino acid substitutions relative to the amino acid sequence of the wild-type PD-L1 polypeptide) as the immunomodulatory polypeptide, the ratio of: i) the binding affinity of the control TMMP to a PD-1 polypeptide (i.e., the cognate co-immunomodulatory polypeptide) to ii) the binding affinity of the TMMP of the present disclosure to the PD-1 polypeptide, when measured by BLI, is at least 1.5:1, at least 2:1, at least 5:1, at least 10:1, at least 15:1, at least 20:1, at least 25:1, at least 50:1, at least 100:1, at least 500:1, at least 10²:1, at least 5×10²:1, at least 10³:1, at least 5×10³:1, at least 10⁴:1, at least 10⁵:1, or at least 10⁶:1.

[0065] As another example, where a control TMMP comprises a wild-type CD80 polypeptide, and where a TMMP of the present disclosure comprises a variant CD80 polypeptide (comprising from 1 to 10 amino acid substitutions relative to the amino acid sequence of the wild-type CD80 polypeptide) as the immunomodulatory polypeptide, the ratio of: i) the binding affinity of the control TMMP to a CTLA4 polypeptide (i.e., the cognate co-immunomodulatory polypeptide) to ii) the binding affinity of the TMMP of the present disclosure to the CTLA4 polypeptide, when measured by BLI, is at least 1.5:1, at least 2:1, at least 5:1, at least 10:1, at least 15:1, at least 20:1, at least 25:1, at least 50:1, at least 100:1, at least 500:1, at least 10²:1, at least 5×10²:1, at least 10³:1, at least 5×10³:1, at least 10⁴:1, at least 10⁵:1, or at least 10⁶:1.

[0066] As another example, where a control TMMP comprises a wild-type CD80 polypeptide, and where a TMMP of the present disclosure comprises a variant CD80 polypeptide (comprising from 1 to 10 amino acid substitutions relative to the amino acid sequence of the wild-type CD80 polypeptide) as the immunomodulatory polypeptide, the ratio of: i) the binding affinity of the control TMMP to a CD28 polypeptide (i.e., the cognate co-immunomodulatory polypeptide) to ii) the binding affinity of the TMMP of the present disclosure to the CD28 polypeptide, when measured by BLI, is at least 1.5:1, at least 2:1, at least 5:1, at least 10:1, at least 15:1, at least 20:1, at least 25:1, at least 50:1, at least 100:1, at least 500:1, at least 10²:1, at least 5×10²:1, at least 10³:1, at least 5×10³:1, at least 10⁴:1, at least 10⁵:1, or at least 10⁶:1.

[0067] As another example, where a control TMMP comprises a wild-type 4-1BBL polypeptide, and where a TMMP of the present disclosure comprises a variant 4-1BBL polypeptide (comprising from 1 to 10 amino acid substitutions relative to the amino acid sequence of the wild-type 4-1BBL polypeptide) as the immunomodulatory polypeptide, the ratio of: i) the binding affinity of the control TMMP to a 4-1BB polypeptide (i.e., the cognate co-immunomodulatory polypeptide) to ii) the binding affinity of the TMMP of the present disclosure to the 4-1BB polypeptide, when measured by BLI, is at least 1.5:1, at least 2:1, at least 5:1, at least 10:1, at least 15:1, at least 20:1, at least 25:1, at least 50:1, at least 100:1, at least 500:1, at least 10²:1, at least 5×10²:1, at least 10³:1, at least 5×10³:1, at least 10⁴:1, at least 10⁵:1, or at least 10⁶:1.

[0068] As another example, where a control TMMP comprises a wild-type CD86 polypeptide, and where a TMMP of the present disclosure comprises a variant CD86 polypeptide (comprising from 1 to 10 amino acid substitutions relative to the amino acid sequence of the wild-type CD86 polypeptide) as the immunomodulatory polypeptide, the ratio of: i) the binding affinity of the control TMMP to a CD28 polypeptide (i.e., the cognate co-immunomodulatory polypeptide) to ii) the binding affinity of the TMMP of the present disclosure to the CD28 polypeptide, when measured by BLI, is at least 1.5:1, at least 2:1, at least 5:1, at least 10:1, at least 15:1, at least 20:1, at least 25:1, at least 50:1, at least 100:1, at least 500:1, at least 10²:1, at least 5×10²:1, at least 10³:1, at least 5×10³:1, at least 10⁴:1, at least 10⁵:1, or at least 10⁶:1.

[0069] Binding affinity of a TMMP of the present disclosure to a target T cell can be measured in the following manner: A) contacting a TMMP of the present disclosure with a target T-cell expressing on its surface: i) a cognate co-immunomodulatory polypeptide that binds the parental wild-type immunomodulatory polypeptide; and ii) a T-cell receptor that binds to the epitope, where the TMMP comprises an epitope tag, such that the TMMP binds to the target T-cell; B) contacting the target T-cell-bound TMMP with a fluorescently labeled binding agent (e.g., a fluorescently labeled antibody) that binds to the epitope tag, generating a TMMP/target T-cell/binding agent complex; C) measuring the mean fluorescence intensity (MFI) of the TMMP/target T-cell/binding agent complex using flow cytometry. The epitope tag can be, e.g., a FLAG tag, a hemagglutinin tag, a c-myc tag, a poly(histidine) tag, etc. The MFI measured over a range of concentrations of the TMMP library member provides a measure of the affinity. The MFI measured over a range of concentrations of the TMMP library member provides a half maximal effective concentration (EC₅₀) of the TMMP. In some cases, the EC₅₀ of a TMMP of the present disclosure for a target T cell is in the nM range; and the EC₅₀ of the TMMP for a control T cell (where a control T cell expresses on its surface: i) a cognate co-immunomodulatory polypeptide that binds the parental wild-type immunomodulatory polypeptide; and ii) a T-cell receptor that does not bind to the epitope present in the TMMP) is in the μM range. In some cases, the ratio of the EC₅₀ of a TMMP of the present disclosure for a control T cell to the EC₅₀ of the TMMP for a target T cell is at least 1.5:1, at least 2:1, at least 5:1, at least 10:1, at least 15:1, at least 20:1, at least 25:1, at least 50:1, at least 100:1, at least 500:1, at least 10²:1, at least 5×10²:1, at least 10³:1, at least 5×10³:1, at least 10⁴:1, at lease 10⁵:1, or at least 10⁶:1. The ratio of the EC₅₀ of a TMMP of the present disclosure for a control T cell to the EC₅₀ of the TMMP for a target T cell is an expression of the selectivity of the TMMP.

[0070] In some cases, when measured as described in the preceding paragraph, a TMMP of the present disclosure exhibits selective binding to target T-cell, compared to binding of the TMMP library member to a control T cell that comprises: i) the cognate co-immunomodulatory polypeptide that binds the parental wild-type immunomodulatory polypeptide; and ii) a T-cell receptor that binds to an epitope other than the epitope present in the TMMP library member.

### Dimerized TMMPs

[0071] A TMMP of the present disclosure can be dimerized; i.e., the present disclosure provides a multimeric polypeptide comprising a dimer of a TMMP of the present disclosure. Thus, the present disclosure provides a TMMP comprising: A) a first heterodimer comprising: a) a first polypeptide comprising: i) a peptide epitope; and ii) a first major histocompatibility complex (MHC) polypeptide; and b) a second polypeptide comprising: i) a second MHC polypeptide, wherein the first heterodimer comprises one or more immunomodulatory polypeptides; and B) a second heterodimer comprising: a) a first polypeptide comprising: i) a peptide epitope; and ii) a first MHC polypeptide; and b) a second polypeptide comprising: i) a second MHC polypeptide, wherein the second heterodimer comprises one or more immunomodulatory polypeptides, and wherein the first heterodimer and the second heterodimer are covalently linked to one another. In some cases, the two TMMPs are identical to one another in amino acid sequence. In some cases, the first heterodimer and the second heterodimer are covalently linked to one another via a C-terminal region of the second polypeptide of the first heterodimer and a C-terminal region of the second polypeptide of the second heterodimer. In some cases, first heterodimer and the second heterodimer are covalently linked to one another via the C-terminal amino acid of the second polypeptide of the first heterodimer and the C-terminal region of the second polypeptide of the second heterodimer; for example, in some cases, the C-terminal amino acid of the second polypeptide of the first heterodimer and the C-terminal region of the second polypeptide of the second heterodimer are linked to one another, either directly or via a linker. The linker can be a peptide linker. The peptide linker can have a length of from 1 amino acid to 200 amino acids (e.g., from 1 amino acid (aa) to 5 aa, from 5 aa to 10 aa, from 10 aa to 25 aa, from 25 aa to 50 aa, from 50 aa to 100 aa, from 100 aa to 150 aa, or from 150 aa to 200 aa). In some cases, the peptide epitope of the first heterodimer and the peptide epitope of the second heterodimer comprise the same amino acid sequence. In some cases, the first MHC polypeptide of the first and the second heterodimer is an MHC Class I β2-microglobulin, and wherein the second MHC polypeptide of the first and the second heterodimer is an MHC Class I heavy chain. In some cases, the immunomodulatory polypeptide of the first heterodimer and the immunomodulatory polypeptide of the second heterodimer comprise the same amino acid sequence. In some cases, the immunomodulatory polypeptide of the first heterodimer and the immunomodulatory polypeptide of the second heterodimer are variant immunomodulatory polypeptides that comprise from 1 to 10 amino acid substitutions compared to a corresponding parental wild-type immunomodulatory polypeptide, and wherein the from 1 to 10 amino acid substitutions result in reduced affinity binding of the variant immunomodulatory polypeptide to a cognate co-immunomodulatory polypeptide. In some cases, the immunomodulatory polypeptide of the first heterodimer and the immunomodulatory polypeptide of the second heterodimer are each independently selected from the group consisting of IL-2, 4-1BBL, PD-L1, CD80, CD86, ICOS-L, OX-40L, FasL, JAG1 (CD339), TGFβ, CD70, and ICAM. Examples, of suitable MHC polypeptides, immunomodulatory polypeptides, and peptide epitopes are described below.

### MHC Polypeptides

[0072] As noted above, a TMMP of the present disclosure includes MHC polypeptides. For the purposes of the instant disclosure, the term “major histocompatibility complex (MHC) polypeptides” is meant to include MHC polypeptides of various species, including human MHC (also referred to as human leukocyte antigen (HLA)) polypeptides, rodent (e.g., mouse, rat, etc.) MHC polypeptides, and MHC polypeptides of other mammalian species (e.g., lagomorphs, non-human primates, canines, felines, ungulates (e.g., equines, bovines, ovines, caprines, etc.), and the like. The term “MHC polypeptide” is meant to include Class I MHC polypeptides (e.g., β-2 microglobulin and MHC class I heavy chain).

[0073] In some cases, the first MHC polypeptide is an MHC Class I β2M (β2M) polypeptide, and the second MHC polypeptide is an MHC Class I heavy chain (H chain) (“MHC-H”)). In other instances, the first MHC polypeptide is an MHC Class I heavy chain polypeptide; and the second MHC polypeptide is a β2M polypeptide. In some cases, both the β2M and MHC-H chain are of human origin; i.e., the MHC-H chain is an HLA heavy chain, or a variant thereof. Unless expressly stated otherwise, a TMMP of the present disclosure does not include membrane anchoring domains (transmembrane regions) of an MHC Class I heavy chain, or a part of MHC Class I heavy chain sufficient to anchor the resulting TMMP to a cell (e.g., eukaryotic cell such as a mammalian cell) in which it is expressed. In some cases, the MHC Class I heavy chain present in a TMMP of the present disclosure does not include a signal peptide, a transmembrane domain, or an intracellular domain (cytoplasmic tail) associated with a native MHC Class I heavy chain. Thus, e.g., in some cases, the MHC Class I heavy chain present in a TMMP of the present disclosure includes only the α1, α2, and α3 domains of an MHC Class I heavy chain. In some cases, the MHC Class I heavy chain present in a TMMP of the present disclosure has a length of from about 270 amino acids (aa) to about 290 aa. In some cases, the MHC Class I heavy chain present in a TMMP of the present disclosure has a length of 270 aa, 271 aa, 272 aa, 273 aa, 274 aa, 275 aa, 276 aa, 277 aa, 278 aa, 279 aa, 280 aa, 281 aa, 282 aa, 283 aa, 284 aa, 285 aa, 286 aa, 287 aa, 288 aa, 289 aa, or 290 aa.

[0074] In some cases, an MHC polypeptide of a TMMP is a human MHC polypeptide, where human MHC polypeptides are also referred to as “human leukocyte antigen” (“HLA”) polypeptides. In some cases, an MHC polypeptide of a TMMP is a Class I HLA polypeptide, e.g., a β2-microglobulin polypeptide, or a Class I HLA heavy chain polypeptide. Class I HLA heavy chain polypeptides include HLA-A heavy chain polypeptides, HLA-B heavy chain polypeptides, HLA-C heavy chain polypeptides, HLA-E heavy chain polypeptides, HLA-F heavy chain polypeptides, and HLA-G heavy chain polypeptides.

### MHC Class I Heavy Chains

[0075] In some cases, an MHC Class I heavy chain polypeptide present in a TMMP of the present disclosure comprises an amino acid sequence having at least 75%, at least 80%, at least 85%, at least 90%, at least 95%, at least 98%, at least 99%, or 100%, amino acid sequence identity to all or part (e.g., 50, 75, 100, 150, 200, or 250 contiguous amino acids) of the amino acid sequence of any of the human HLA heavy chain polypeptides depicted in FIGS. 7-13. In some cases, the MHC Class I heavy chain has a length of 270 aa, 271 aa, 272 aa, 273 aa, 274 aa, 275 aa, 276 aa, 277 aa, 278 aa, 279 aa, 280 aa, 281 aa, 282 aa, 283 aa, 284 aa, 285 aa, 286 aa, 287 aa, 288 aa, 289 aa, or 290 aa. In some cases, an MHC Class I heavy chain polypeptide present in a TMMP of the present disclosure comprises 1-30, 1-5, 5-10, 10-15, 15-20, 20-25 or 25-30 amino acid insertions, deletions, and/or substitutions (in addition to those locations indicated as being variable in the heavy chain consensus sequences) of any one of the amino acid sequences depicted in FIGS. 7-13. In some cases, the MHC Class I heavy chain does not include transmembrane or cytoplasmic domains. As an example, a MHC Class I heavy chain polypeptide of a TMMP of the present disclosure can comprise an amino acid sequence having at least 75%, at least 80%, at least 85%, at least 90%, at least 95%, at least 98%, at least 99%, or 100%, amino acid sequence identity to amino acids 25-300 (lacking all, or substantially all, of the leader, transmembrane and cytoplasmic sequence) or amino acids 25-365 (lacking the leader) of a human HLA-A heavy chain polypeptides depicted in any one of FIGS. 5A, 5B, and 5C.

[0076] FIGS. 5A, 5B and 5C provide amino acid sequences of human leukocyte antigen (HLA) Class I heavy chain polypeptides. Signal sequences, amino acids 1-24, are bolded and underlined. FIG. 5A entry: 3A.1 is the HLA-A heavy chain (HLA-A*01:01:01:01 or A*0101) (NCBI accession NP_001229687.1), SEQ ID NO:23; entry 3A.2 is from HLA-A*1101 SEQ ID NO:24; entry 3A.3 is from HLA-A*2402 SEQ ID NO:25 and entry 3A.4 is from HLA-A*3303 SEQ ID NO:26. FIG. 5B provides the sequence HLA-B*07:02:01 (HLA-B*0702) NCBI GenBank Accession NP_005505.2 (see also GenBank Accession AUV50118.1.). FIG. 5C provides the sequence HLA-C*0701 (GenBank Accession NP_001229971.1) (HLA-C*07:01:01:01 or HLA-Cw*070101, HLA-Cw*07 see GenBank Accession CAO78194.1).

[0077] FIG. 6 provides an alignment of eleven mature MHC class I heavy chain amino acid sequences without their leader sequences or transmembrane domains or intracellular domains. The aligned sequences are human HLA-A, HLA-B, and HLA-C, a mouse H2K protein sequence, three variants of HLA-A (var.1, var. 2C, and var.2CP), and 3 human HLA-A variants (HLA-A*1101; HLA-A*2402; and HLA-A*3303). Indicated in the alignment are the locations (84 and 139 of the mature proteins) where cysteine residues may be introduced (e.g., by substitution) for the formation of a disulfide bond to stabilize the MHC H chain-β2M complex. Also shown in the alignment is position 236 (of the mature polypeptide), which may be substituted by a cysteine residue that can form an inter-chain disulfide bond with β2M (e.g., at aa 12). An arrow appears above each of those locations and the residues are bolded. The seventh HLA-A sequence shown in the alignment (var. 2c), shows the sequence of variant 2 substituted with C residues at positions 84, 139 and 236. The boxes flanking residues 84, 139 and 236 show the groups of five amino acids on either sides of those six sets of five residues, denoted aac1 (for “amino acid cluster 1”), aac2 (for “amino acid cluster 2”), aac3 (for “amino acid cluster 3”), aac4 (for “amino acid cluster 4”), aac5 (for “amino acid cluster 5”), and aac6 (for “amino acid cluster 6”), that may be replaced by 1 to 5 amino acids selected independently from (i) any naturally occurring amino acid or (ii) any naturally occurring amino acid except proline or glycine.

[0078] With regard to FIG. 6, in some cases: i) aac1 (amino acid cluster 1) may be the amino acid sequence GTLRG (SEQ ID NO:287) or that sequence with one or two amino acids deleted or substituted with other naturally occurring amino acids (e.g., L replaced by I, V, A or F); ii) aac2 (amino acid cluster 2) may be the amino acid sequence YNQSE (SEQ ID NO:288) or that sequence with one or two amino acids deleted or substituted with other naturally occurring amino acids (e.g., N replaced by Q, Q replaced by N, and/or E replaced by D); iii) aac3 (amino acid cluster 3) may be the amino acid sequence TAADM (SEQ ID NO:289) or that sequence with one or two amino acids deleted or substituted with other naturally occurring amino acids (e.g., T replaced by S, A replaced by G, D replaced by E, and/or M replaced by L, V, or I); iv) aac4 (amino acid cluster 4) may be the amino acid sequence AQTTK (SEQ ID NO:290) or that sequence with one or two amino acids deleted or substituted with other naturally occurring amino acids (e.g., A replaced by G, Q replaced by N, or T replaced by S, and/or K replaced by R or Q); v) aac5 (amino acid cluster 5) may be the amino acid sequence VETRP (SEQ ID NO:291) or that sequence with one or two amino acids deleted or substituted with other naturally occurring amino acids (e.g., V replaced by I or L, E replaced by D, T replaced by S, and/or R replaced by K); and/or vi) aac6 (amino acid cluster 6) may be the amino acid sequence GDGTF (SEQ ID NO:292) or that sequence with one or two amino acids deleted or substituted with other naturally occurring amino acids (e.g., D replaced by E, T replaced by S, or F replaced by L, W, or Y).

[0079] FIGS. 7-9 provide alignments of mature HLA class I heavy chain amino acid sequences (without leader sequences or transmembrane domains or intracellular domains). The aligned amino acid sequences in FIG. 7A are HLA-A class I heavy chains of the following alleles: A*0101, A*0201, A*0301, A*1101, A*2301, A*2402, A*2407, A*3303, and A*3401. The aligned amino acid sequences in FIG. 8A are HLA-B class I heavy chains of the following alleles: B*0702, B*0801, B*1502, B*3802, B*4001, B*4601, and B*5301. The aligned amino acid sequences in FIG. 9A are HLA-C class I heavy chains of the following alleles: C*0102, C*0303, C*0304, C*0401, C*0602, C*0701, C*0801, and C*1502. Indicated in the alignments are the locations (84 and 139 of the mature proteins) where cysteine residues may be introduced (e.g., by substitution) for the formation of a disulfide bond to stabilize the HLA H chain-β2M complex. Also shown in the alignment is position 236 (of the mature polypeptide), which may be substituted by a cysteine residue that can form an inter-chain disulfide bond with β2M (e.g., at aa 12). The boxes flanking residues 84, 139 and 236 show the groups of five amino acids on either sides of those six sets of five residues, denoted aac1 (for “amino acid cluster 1”), aac2 (for “amino acid cluster 2”), aac3 (for “amino acid cluster 3”), aac4 (for “amino acid cluster 4”), aac5 (for “amino acid cluster 5”), and aac6 (for “amino acid cluster 6”), that may be replaced by 1 to 5 amino acids selected independently from (i) any naturally occurring amino acid or (ii) any naturally occurring amino acid except proline or glycine.

[0080] FIGS. 7A, 8A, and 9A provide alignments of the amino acid sequences of mature HLA-A, -B, and -C class I heavy chains, respectively. The sequences are provided for the extracellular portion of the mature protein (without leader sequences or transmembrane domains or intracellular domains). As described in FIG. 6, the positions of aa residues 84, 139, and 236 and their flanking residues (aac1 to aac6) that may be replaced by 1 to 5 amino acids selected independently from (i) any naturally occurring amino acid or (ii) any naturally occurring amino acid except proline or glycine ae also shown. FIGS. 7B, 8B, and 9B provide consensus amino acid sequences for the HLA-A, -B, and -C sequences, respectively, provide in FIGS. 7A, 8A, and 9A. The consensus sequences show the variable amino acid positions as “X” residues sequentially numbered and the locations of amino acids 84, 139 and 236 double underlined.

[0081] With regard to FIG. 7A, in some cases: i) aac1 (amino acid cluster 1) may be the amino acid sequence GTLRG (SEQ ID NO:287) or that sequence with one or two amino acids deleted or substituted with other naturally occurring amino acids (e.g., L replaced by I, V, A or F); ii) aac2 (amino acid cluster 2) may be the amino acid sequence YNQSE (SEQ ID NO:288) or that sequence with one or two amino acids deleted or substituted with other naturally occurring amino acids (e.g., N replaced by Q, Q replaced by N, and/or E replaced by D); iii) aac3 (amino acid cluster 3) may be the amino acid sequence TAADM (SEQ ID NO:289) or that sequence with one or two amino acids deleted or substituted with other naturally occurring amino acids (e.g., T replaced by S, A replaced by G, D replaced by E, and/or M replaced by L, V, or I); iv) aac4 (amino acid cluster 4) may be the amino acid sequence AQTTK (SEQ ID NO:290) or that sequence with one or two amino acids deleted or substituted with other naturally occurring amino acids (e.g., A replaced by G, Q replaced by N, or T replaced by S, and or K replaced by R or Q); v) aac5 (amino acid cluster 5) may be the amino acid sequence VETRP (SEQ ID NO:291) or that sequence with one or two amino acids deleted or substituted with other naturally occurring amino acids (e.g., V replaced by I or L, E replaced by D, T replaced by S, and/or R replaced by K); and/or vi) aac6 (amino acid cluster 6) may be the amino acid sequence GDGTF (SEQ ID NO:292) or that sequence with one or two amino acids deleted or substituted with other naturally occurring amino acids (e.g., D replaced by E, T replaced by S, or F replaced by L, W, or Y).

[0082] With regard to FIG. 8A, in some cases: i) aac1 (amino acid cluster 1) may be the amino acid sequence RNLRG (SEQ ID NO:293) or that sequence with one or two amino acids deleted or substituted with other naturally occurring amino acids (e.g., N replaced by T or I; and/or L replaced by A; and/or the second R replaced by L; and/or the G replaced by R); ii) aac2 (amino acid cluster 2) may be the amino acid sequence YNQSE (SEQ ID NO:288) or that sequence with one or two amino acids deleted or substituted with other naturally occurring amino acids (e.g., N replaced by Q, Q replaced by N, and/or E replaced by D); iii) aac3 (amino acid cluster 3) may be the amino acid sequence TAADT (SEQ ID NO:294) or that sequence with one or two amino acids deleted or substituted with other naturally occurring amino acids (e.g., the first T replaced by S; and/or A replaced by G; and/or D replaced by E; and/or the second T replaced by S); iv) aac4 (amino acid cluster 4) may be the amino acid sequence AQITQ (SEQ ID NO:295) or that sequence with one or two amino acids deleted or substituted with other naturally occurring amino acids (e.g., A replaced by G; and/or the first Q replaced by N; and/or I replaced by L or V; and/or the T replaced by S; and/or the second Q replaced by N); v) aac5 (amino acid cluster 5) may be the amino acid sequence VETRP (SEQ ID NO:291) or that sequence with one or two amino acids deleted or substituted with other naturally occurring amino acids (e.g., V replaced by I or L, E replaced by D, T replaced by S, and/or R replaced by K); and/or vi) aac6 (amino acid cluster 6) may be the amino acid sequence GDRTF (SEQ ID NO:296) or that sequence with one or two amino acids deleted or substituted with other naturally occurring amino acids (e.g., D replaced by E; and/or T replaced by S; and/or R replaced by K or H; and/or F replaced by L, W, or Y).

[0083] With regard to FIG. 9A, in some cases: i) aac1 (amino acid cluster 1) may be the amino acid sequence RNLRG (SEQ ID NO:293) or that sequence with one or two amino acids deleted or substituted with other naturally occurring amino acids (e.g., N replaced by K; and/or L replaced by A or I; and/or the second R replaced by H; and/or the G replaced by T or S); ii) aac2 (amino acid cluster 2) may be the amino acid sequence YNQSE (SEQ ID NO:288) or that sequence with one or two amino acids deleted or substituted with other naturally occurring amino acids (e.g., N replaced by Q, Q replaced by N, and/or E replaced by D); iii) aac3 (amino acid cluster 3) may be the amino acid sequence TAADT (SEQ ID NO:294) or that sequence with one or two amino acids deleted or substituted with other naturally occurring amino acids (e.g., the first T replaced by S; and/or A replaced by G; and/or D replaced by E; and/or the second T replaced by S); iv) aac4 (amino acid cluster 4) may be the amino acid sequence AQITQ (SEQ ID NO:295) or that sequence with one or two amino acids deleted or substituted with other naturally occurring amino acids (e.g., A replaced by G; and/or the first Q replaced by N; and/or I replaced by L; and/or the second Q replaced by N or K); v) aac5 (amino acid cluster 5) may be the amino acid sequence VETRP (SEQ ID NO:291) or that sequence with one or two amino acids deleted or substituted with other naturally occurring amino acids (e.g., V replaced by I or L, E replaced by D, T replaced by S, and/or R replaced by K or H); and/or vi) aac6 (amino acid cluster 6) may be the amino acid sequence GDGTF (SEQ ID NO:292) or that sequence with one or two amino acids deleted or substituted with other naturally occurring amino acids (e.g., D replaced by E; and/or T replaced by S; and/or F replaced by L, W, or Y).

### HLA-A

[0084] In some cases, a TMMP of the present disclosure comprises an HLA-A heavy chain polypeptide. The HLA-A heavy chain peptide sequences, or portions thereof, that may be that may be incorporated into a TMMP of the present disclosure include, but are not limited to, the alleles: A*0101, A*0201, A*0301, A*1101, A*2301, A*2402, A*2407, A*3303, and A*3401, which are aligned without all, or substantially all, of the leader, transmembrane and cytoplasmic sequences in FIG. 7A. Any of those alleles may comprise a mutation at one or more of positions 84, 139 and/or 236 (as shown in FIG. 7A) selected from: a tyrosine to alanine at position 84 (Y84A); a tyrosine to cysteine at position 84 (Y84C); an alanine to cysteine at position 139 (A139C); and an alanine to cysteine substitution at position 236 (A236C). In addition, HLA-A sequence having at least 75% (e.g., at least 80%, at least 85%, at least 90%, at least 95%, at least 98%, at least 99%) or 100% amino acid sequence identity to all or part (e.g., 50, 75, 100, 150, 200, or 250 contiguous amino acids) of the sequence of those HLA-A alleles may also be employed (e.g., it may comprise 1-25, 1-5, 5-10, 10-15, 15-20, 20-25, or 25-30 amino acid insertions, deletions, and/or substitutions).

[0085] In some cases, a TMMP of the present disclosure comprises an HLA-A heavy chain polypeptide comprising the following HLA-A consensus amino acid sequence:

(SEQ ID NO: 29)
GSHSMRYFX1TSVSRPGRGEPRFIAVGYVDDTQFVRFDSDAASQX2MEPR
APWIEQEGPEYWDX3X4TX5X6X7KAX8SQX9X10RX11X12LX13X14
X15X16X17 [symbol] YNQSEX18GSHTX19QX20MX21GCDVGX22DX23RFLRG
YX24QX25AYDGKDYIALX26EDLRSWTAADM [symbol] AQX27TX287X29KWE
X30X31X32EAEQX33RX34YLX35GX36CVX37X38LRRYLENGKETLQ
RTDX39PKTHMTHHX40X41SDHEATLRCWALX42FYPAEITLTWQRDGE
DQTQDTELVETRP [symbol] GDGTFQKWAX43VVVPSGX44EQRYTCHVQHEGLPK
PLTLRWEX45,

wherein X1 is F, Y, S, or T; X2 is K or R; X3 s Q, G, E, or R; X4 is N or E; X5 is R or G; X6 is N or K; X7 is M or V; X8 is H or Q; X9 is T or I; X10 is D or H; X11 is A, V, or E; X12 is N or D; X13 is G or R; X14 is T or I; X15 is L or A; X16 is R or L; X17 is G or R; X18 is A or D; X19 is I, L, or V; X20 is I, R or M; X21 is F or Y; X22 is S or P; X23 is W or G; X24 is R, H, or Q; X25 is D or Y; X26 is N or K; X27 is T or I; X28 is K or Q; X29 is R or H; X30 is A or T; X31 is A or V; X32 is H or R; X33 is Q, or W; X34 is V or A; X35 is D or E; X36 is R or T; X37 is D or E; X38 is W or G; X39 is P or A; X40 is P or A; X41 is V or I; X42 is S or G; X43 is A or S; X44 is Q or E; and X45 is P or L.

[0086] As one example, an MHC Class I heavy chain polypeptide of a TMMP can comprise an amino acid sequence having at least 75%, at least 80%, at least 85%, at least 90%, at least 95%, at least 98%, at least 99%, or 100%, amino acid sequence identity to the following human HLA-A heavy chain amino acid sequence:

(SEQ ID NO: 297)
[sequence omitted]

[0087] In some cases, an HLA-A heavy chain polypeptide suitable for inclusion in a TMMP of the present disclosure comprises the following amino acid sequence:

(SEQ ID NO: 297)
[sequence omitted]

This HLA-A heavy chain polypeptide is also referred to as “HLA-A*0201” or simply “HLA-A02.” In some cases, the C-terminal Pro is not included in a TMMP of the present disclosure. For example, in some cases, an HLA-A02 polypeptide suitable for inclusion in a TMMP of the present disclosure comprises the following amino acid sequence:

(SEQ ID NO: 461)
[sequence omitted]

### HLA-A (Y84A; A236C)

[0088] In some cases, the MHC Class I heavy chain polypeptide comprises Y84A and A236C substitutions. For example, in some cases, the MHC Class I heavy chain polypeptide comprises an amino acid sequence having at least 75%, at least 80%, at least 85%, at least 90%, at least 95%, at least 98%, at least 99%, or 100%, amino acid sequence identity to the following human HLA-A heavy chain (Y84A; A236C) amino acid sequence:

(SEQ ID NO: 298)
GSHSMRYFFTSVSRPGRGEPRFIAVGYVDDTQFVRFDSDAASQRMEPRAPW
IEQEGPEYWDGETRKVKAHSQTHRVDLGTLRGAYNQSEAGSHTVQRMYGCD
VGSDWRFLRGYHQYAYDGKDYIALKEDLRSWTAADMAAQTTKHKWEAAHVA
EQLRAYLEGTCVEWLRRYLENGKETLQRTDAPKTHMTHHAVSDHEATLRCW
ALSFYPAEITLTWQRDGEDQTQDTELVETRPCGDGTFQKWAAVVVPSGQEQ
RYTCHVQHEGLPKPLTLRWEP,

where amino acid 84 is Ala and amino acid 236 is Cys. In some cases, the Cys-236 forms an interchain disulfide bond with Cys-12 of a variant β2M polypeptide that comprises an R12C substitution.

[0089] In some cases, an HLA-A heavy chain polypeptide suitable for inclusion in a TMMP of the present disclosure is an HLA-A02 (Y84A; A236C) polypeptide comprising the following amino acid sequence:

(SEQ ID NO: 298)
GSHSMRYFFTSVSRPGRGEPRFIAVGYVDDTQFVRFDSDAASQRMEPRAPW
IEQEGPEYWDGETRKVKAHSQTHRVDLGTLRGAYNQSEAGSHTVQRMYGCD
VGSDWRFLRGYHQYAYDGKDYIALKEDLRSWTAADMAAQTTKHKWEAAHVA
EQLRAYLEGTCVEWLRRYLENGKETLQRTDAPKTHMTHHAVSDHEATLRCW
ALSFYPAEITLTWQRDGEDQTQDTELVETRPCGDGTFQKWAAVVVPSGQEQ
RYTCHVQHEGLPKPLTLRWEP.

[0090] In some cases, an HLA-A heavy chain polypeptide suitable for inclusion in a TMMP of the present disclosure is an HLA-A02 (Y84A; A236C) polypeptide comprising the following amino acid sequence:

(SEQ ID NO: 462)
GSHSMRYFFTSVSRPGRGEPRFIAVGYVDDTQFVRFDSDAASQRMEPRAPW
IEQEGPEYWDGETRKVKAHSQTHRVDLGTLRGAYNQSEAGSHTVQRMYGCD
VGSDWRFLRGYHQYAYDGKDYIALKEDLRSWTAADMAAQTTKHKWEAAHVA
EQLRAYLEGTCVEWLRRYLENGKETLQRTDAPKTHMTHHAVSDHEATLRCW
ALSFYPAEITLTWQRDGEDQTQDTELVETRPCGDGTFQKWAAVVVPSGQEQ
RYTCHVQHEGLPKPLTLRWE.

### HLA-A (Y84C; A139C)

[0091] In some cases, the MHC Class I heavy chain polypeptide comprises Y84C and A139C substitutions. For example, in some cases, the MHC Class I heavy chain polypeptide comprises an amino acid sequence having at least 75%, at least 80%, at least 85%, at least 90%, at least 95%, at least 98%, at least 99%, or 100%, amino acid sequence identity to the following human HLA-A heavy chain (Y84C; A139C) amino acid sequence:

(SEQ ID NO: 299)
GSHSMRYFFTSVSRPGRGEPRFIAVGYVDDTQFVRFDSDAASQRMEPRAPW
IEQEGPEYWDGETRKVKAHSQTHRVDLGTLRGCYNQSEAGSHTVQRMYGCD
VGSDWRFLRGYHQYAYDGKDYIALKEDLRSWTAADMCAQTTKHKWEAAHVA
EQLRAYLEGTCVEWLRRYLENGKETLQRTDAPKTHMTHHAVSDHEATLRCW
ALSFYPAEITLTWQRDGEDQTQDTELVETRPAGDGTFQKWAAVVVPSGQEQ
RYTCHVQHEGLPKPLTLRWEP,

where amino acid 84 is Cys and amino acid 139 is Cys. In some cases, Cys-84 forms an intrachain disulfide bond with Cys-139.

### HLA-A11 (HLA-A*1101)

[0092] As one non-limiting example, an MHC Class I heavy chain polypeptide of a TMMP can comprise an amino acid sequence having at least 75%, at least 80%, at least 85%, at least 90%, at least 95%, at least 98%, at least 99%, or 100%, amino acid sequence identity to the following human HLA-A11 heavy chain amino acid sequence:

(SEQ ID NO: 300)
GSHSMRYFYTSVSRPGRGEPRFIAVGYVDDTQFVRFDSDAASQRMEPRAPW
IEQEGPEYWDQETRNVKAQSQTDRVDLGTLRGYYNQSEDGSHTIQIMYGCD
VGPDGRFLRGYRQDAYDGKDYIALNEDLRSWTAADMAAQITKRKWEAAHAA
EQQRAYLEGTCVEWLRRYLENGKETLQRTDPPKTHMTHHPISDHEATLRCW
ALGFYPAEITLTWQRDGEDQTQDTELVETRPAGDGTFQKWAAVVVPSGEEQ
RYTCHVQHEGLPKPLTLRWE.

Such an MHC Class I heavy chain may be prominent in Asian populations, including populations of individuals of Asian descent.

### HLA-A11 (Y84A; A236C)

[0093] As one non-limiting example, in some cases, the MHC Class I heavy chain polypeptide is an HLA-A11 allele that comprises Y84A and A236C substitutions. For example, in some cases, the MHC Class I heavy chain polypeptide comprises an amino acid sequence having at least 75%, at least 80%, at least 85%, at least 90%, at least 95%, at least 98%, at least 99%, or 100%, amino acid sequence identity to the following human HLA-A A11 heavy chain (Y84A; A236C) amino acid sequence:

(SEQ ID NO: 301)
GSHSMRYFYTSVSRPGRGEPRFIAVGYVDDTQFVRFDSDAASQRMEPRAPW
IEQEGPEYWDQETRNVKAQSQTDRVDLGTLRGAYNQSEDGSHTIQIMYGCD
VGPDGRFLRGYRQDAYDGKDYIALNEDLRSWTAADMAAQITKRKWEAAHAA
EQQRAYLEGTCVEWLRRYLENGKETLQRTDPPKTHMTHHPISDHEATLRCW
ALGFYPAEITLTWQRDGEDQTQDTELVETRPCGDGTFQKWAAVVVPSGEEQ
RYTCHVQHEGLPKPLTLRWE,

where amino acid 84 is Ala and amino acid 236 is Cys. In some cases, the Cys-236 forms an interchain disulfide bond with Cys-12 of a variant β2M polypeptide that comprises an R12C substitution.

### HLA-A24 (HLA-A*2402)

[0094] As one non-limiting example, an MHC Class I heavy chain polypeptide of a TMMP of the present disclosure can comprise an amino acid sequence having at least 75%, at least 80%, at least 85%, at least 90%, at least 95%, at least 98%, at least 99%, or 100%, amino acid sequence identity to the following human HLA-A24 heavy chain amino acid sequence:

(SEQ ID NO: 302)
GSHSMRYFSTSVSRPGRGEPRFIAVGYVDDTQFVRFDSDAASQRMEPRAPW
IEQEGPEYWDEETGKVKAHSQTDRENLRIALRYYNQSEAGSHTLQMMFGCD
VGSDGRFLRGYHQYAYDGKDYIALKEDLRSWTAADMAAQITKRKWEAAHVA
EQQRAYLEGTCVDGLRRYLENGKETLQRTDPPKTHMTHHPISDHEATLRCW
ALGFYPAEITLTWQRDGEDQTQDTELVETRPAGDGTFQKWAAVVVPSGEEQ
RYTCHVQHEGLPKPLTLRWEPSSQPTVPIVGIIAGLVLLGAVITGAVVAAV
MWRRNSSDRKGGSYSQAASSDSAQGSDVSLTACKV.

Such an MHC Class I heavy chain may be prominent in Asian populations, including populations of individuals of Asian descent. In some cases, amino acid 84 is an Ala. In some cases, amino acid 84 is a Cys. In some cases, amino acid 236 is a Cys. In some cases, amino acid 84 is an Ala and amino acid 236 is a Cys. In some cases, amino acid 84 is an Cys and amino acid 236 is a Cys.

### HLA-A33 (HLA-A*3303)

[0095] As one non-limiting example, an MHC Class I heavy chain polypeptide of a TMMP of the present disclosure can comprise an amino acid sequence having at least 75%, at least 80%, at least 85%, at least 90%, at least 95%, at least 98%, at least 99%, or 100%, amino acid sequence identity to the following human HLA-A33 heavy chain amino acid sequence:

(SEQ ID NO: 303)
GSHSMRYFTTSVSRPGRGEPRFIAVGYVDDTQFVRFDSDAASQRMEPRAPW
IEQEGPEYWDRNTRNVKAHSQIDRVDLGTLRGYYNQSEAGSHTIQMMYGCD
VGSDGRFLRGYQQDAYDGKDYIALNEDLRSWTAADMAAQITQRKWEAARVA
EQLRAYLEGTCVEWLRRYLENGKETLQRTDPPKTHMTHHAVSDHEATLRCW
ALSFYPAEITLTWQRDGEDQTQDTELVETRPAGDGTFQKWASVVVPSGQEQ
RYTCHVQHEGLPKPLTLRWEPSSQPTIPIVGIIAGLVLFGAVFAGAVVAAV
RWRRKSSDRKGGSYSQAASSDSAQGSDMSLTACKV.

Such an MHC Class I heavy chain may be prominent in Asian populations, including populations of individuals of Asian descent. In some cases, amino acid 84 is an Ala. In some cases, amino acid 84 is a Cys. In some cases, amino acid 236 is a Cys. In some cases, amino acid 84 is an Ala and amino acid 236 is a Cys. In some cases, amino acid 84 is an Cys and amino acid 236 is a Cys.

### HLA-B

[0096] In some cases, a TMMP of the present disclosure comprises an HLA-B heavy chain polypeptide. The HLA-B heavy chain peptide sequences, or portions thereof, that may be that may be incorporated into a TMMP of the present disclosure include, but are not limited to, the alleles: B*0702, B*0801, B*1502, B*3802, B*4001, B*4601, and B*5301, which are aligned without all, or substantially all, of the leader, transmembrane and cytoplasmic sequences in FIG. 8A. Any of those alleles may comprise a mutation at one or more of positions 84, 139 and/or 236 (as shown in FIG. 8A) selected from: a tyrosine to alanine at position 84 (Y84A); a tyrosine to cysteine at position 84 (Y84C); an alanine to cysteine at position 139 (A139C); and an alanine to cysteine substitution at position 236 (A236C). In addition, a HLA-B polypeptide comprising an amino acid sequence having at least 75% (e.g., at least 80%, at least 85%, at least 90%, at least 95%, at least 98%, at least 99%) or 100% amino acid sequence identity to all or part (e.g., 50, 75, 100, 150, 200, or 250 contiguous amino acids) of the sequence of those HLA-B alleles may also be employed (e.g., it may comprise 1-25, 1-5, 5-10, 10-15, 15-20, 20-25, or 25-30 amino acid insertions, deletions, and/or substitutions).

[0097] In some cases, a TMMP of the present disclosure comprises an HLA-B heavy chain polypeptide comprising the following HLA-B consensus amino acid sequence:

(SEQ ID NO: 30)
GSHSMRYFX1TX2X3SRPGRGEPRFIX4VGYVDDTX5FVRFDSDAX6SPR
X7X8PRAPWIEQEGPEYWDRX9TQX10X11KTX12X13TQX14YX15X16
NLX17X18X19X20YYNQSEAGSHX21X22QX23MYGCDLGPDGRLLRGH
DQSAYDGKDYIALNEDLX24SWTAADTAAQIX25QRKX26EAARX27AEQ
X28RX29YLEGX30CVEWLRRYLENGKX31X32LX33RADPPKTHVTHHP
X34SDHEATLRCWALGFYPAEITLTWQRDGEDQTQDTELVETRPAGDRTF
QKWAAVVVPSGEEQRYTCHVQHEGLPKPLTLRWEP,

wherein X1 is H, Y, or D; X2 is A or S; X3 is M or V; X4 is A, S, or T; X5 is Q or L; X6 is A or T; X7 is E, M K, or T; X8 is A or T; X9 is E or N; X10 is I or K; X11 is Y, F, S, or C; X12 is N or Q; X13 is A or T; X14 is D or Y; X15 is E or V; X16 is S or N; X17 is T, N, or I; X18 is A or L; X19 is L, or R; X20 is R or G; X21 is T or I; X22 is L or I; X23 is R or S; X24 is R or S; X25 is S or T; X26 is L or W; X27 is E OR V; X28 is R, D, L or W; X29 is A or T; X30 is L, E or T; X31 is E or D; X32 is K or T; X33 is E or Q; and X34 is I or V.

[0098] As an example, an MHC Class I heavy chain polypeptide of a TMMP of the present disclosure can comprise an amino acid sequence having at least 75%, at least 80%, at least 85%, at least 90%, at least 95%, at least 98%, at least 99%, or 100%, amino acid sequence identity to the following human HLA-B heavy chain amino acid sequence:

(SEQ ID NO: 304)
[sequence omitted]

### HLA-B (Y84A; A236C)

[0099] As one non-limiting example, in some cases, the MHC Class I heavy chain polypeptide is an HLA-B polypeptide that comprises Y84A and A236C substitutions. For example, in some cases, the MHC Class I heavy chain polypeptide comprises an amino acid sequence having at least 75%, at least 80%, at least 85%, at least 90%, at least 95%, at least 98%, at least 99%, or 100%, amino acid sequence identity to the following human HLA-B heavy chain (Y84A; A236C) amino acid sequence:

(SEQ ID NO: 305)
GSHSMRYFYTSVSRPGRGEPRFISVGYVDDTQFVRFDSDAASPREEPRAPW
IEQEGPEYWDRNTQIYKAQAQTDRESLRNLRGAYNQSEAGSHTLQSMYGCD
VGPDGRLLRGHDQYAYDGKDYIALNEDLRSWTAADTAAQITQRKWEAAREA
EQRRAYLEGECVEWLRRYLENGKDKLERADPPKTHVTHHPISDHEATLRCW
ALGFYPAEITLTWQRDGEDQTQDTELVETRPCGDRTFQKWAAVVVPSGEEQ
RYTCHVQHEGLPKPLTLRWEP,

where amino acid 84 is Ala and amino acid 236 is Cys. In some cases, the Cys-236 forms an interchain disulfide bond with Cys-12 of a variant 132M polypeptide that comprises an R12C substitution.

### HLA-B (Y84C; A139C)

[0100] In some cases, the MHC Class I heavy chain polypeptide comprises Y84C and A139C substitutions. For example, in some cases, the MHC Class I heavy chain polypeptide comprises an amino acid sequence having at least 75%, at least 80%, at least 85%, at least 90%, at least 95%, at least 98%, at least 99%, or 100%, amino acid sequence identity to the following human HLA-B heavy chain (Y84C; A139C) amino acid sequence:

(SEQ ID NO: 306)
GSHSMRYFYTSVSRPGRGEPRFISVGYVDDTQFVRFDSDAASPREEPRAPW
IEQEGPEYWDRNTQIYKAQAQTDRESLRNLRGCYNQSEAGSHTLQSMYGCD
VGPDGRLLRGHDQYAYDGKDYIALNEDLRSWTAADTCAQITQRKWEAAREA
EQRRAYLEGECVEWLRRYLENGKDKLERADPPKTHVTHHPISDHEATLRCW
ALGFYPAEITLTWQRDGEDQTQDTELVETRPAGDRTFQKWAAVVVPSGEEQ
RYTCHVQHEGLPKPLTLRWEP,

where amino acid 84 is Cys and amino acid 139 is Cys. In some cases, Cys-84 forms an intrachain disulfide bond with Cys-139.

### HLA-B*0702

[0101] As an example, in some cases, a MHC Class I heavy chain polypeptide present in a TMMP of the present disclosure comprises an amino acid sequence of HLA-B*0702 (SEQ ID NO:207) in FIG. 8A, or a sequence having at least 75% (e.g., at least 80%, at least 85%, at least 90%, at least 95%, at least 98%, at least 99%) or 100%, amino acid sequence identity to all or part (e.g., 50, 75, 100, 150, 200, or 250 contiguous amino acids) of that sequence (e.g., it may comprise 1-25, 1-5, 5-10, 10-15, 15-20, 20-25, or 25-30 amino acid insertions, deletions, and/or substitutions). In some cases, where the HLA-B heavy chain polypeptide of TMMP of the present disclosure has less than 100% identity to the sequence labeled HLA-B in FIG. 6, or labeled “B*0702 in FIG. 8A, it may comprise a mutation at one or more of positions 84, 139 and/or 236 selected from: a tyrosine to alanine substitution at position 84 (Y84A); a tyrosine to cysteine substitution at position 84 (Y84C); an alanine to cysteine at position 139 (A139C); and an alanine to cysteine substitution at position 236 (A236C). In some cases, the HLA-B heavy chain polypeptide of TMMP of the present disclosure comprises Y84A and A236C substitutions. In some cases, the HLA-B*0702 heavy chain polypeptide of TMMP of the present disclosure comprises Y84C and A139C substitutions. In some cases, the HLA-B heavy chain polypeptide of TMMP of the present disclosure comprises Y84C, A139C, and A236C substitutions.

### HLA-C

[0102] In some cases, a TMMP of the present disclosure comprises an HLA-C heavy chain polypeptide. The HLA-C heavy chain polypeptide, or portions thereof, that may be that may be incorporated into a TMMP of the present disclosure include, but are not limited to, the alleles: C*0102, C*0303, C*0304, C*0401, C*0602, C*0701, C*0801, and C*1502, which are aligned without all, or substantially all, of the leader, transmembrane and cytoplasmic sequences in FIG. 9A. Any of those alleles may comprise a mutation at one or more of positions 84, 139 and/or 236 (as shown in FIG. 9A) selected from: a tyrosine to alanine substitution at position 84 (Y84A); a tyrosine to cysteine substitution at position 84 (Y84C); an alanine to cysteine substitution at position 139 (A139C); and an alanine to cysteine substitution at position 236 (A236C). In addition, an HLA-C polypeptide comprising an amino acid sequence having at least 75% (e.g., at least 80%, at least 85%, at least 90%, at least 95%, at least 98%, at least 99%) or 100% amino acid sequence identity to all or part (e.g., 50, 75, 100, 150, 200, or 250 contiguous amino acids) of the sequence of those HLA-C alleles may also be employed (e.g., it may comprise 1-25, 1-5, 5-10, 10-15, 15-20, 20-25, or 25-30 amino acid insertions, deletions, and/or substitutions).

[0103] In some cases, a TMMP of the present disclosure comprises an HLA-C heavy chain polypeptide comprising the following HLA-C consensus amino acid sequence:

(SEQ ID NO: 31)
X1SHSMX2YFX3TAVSX4PGRGEPX5FIX6VGYVDDTQFVX7FDSDAASP
RGEPRX8PWVEQEGPEYWDRETQX9YKRQAQX10DRVX11LRX12LRGYY
NQSEX13X14SHX15X16QX17MX18GCDX19GPDGRLLRGX20X21Q
X22AYDGKDYIALNEDLRSWTAADTAAQITQRKX23EAARX24AEQX25R
AYLEGX26CVEWLRRYLX27NGKX28TLQRAEX29PKTHVTHHPX30SDH
EATLRCWALGFYPAEITLTWQX31DGEDQTQDTELVETRPAGDGTFQKWA
AVX32VPSGX33EQRYTCHX34QHEGLX35EPLTLX36WX37P,

wherein X1 is C or G; X2 is R or K; X3 is F, Y, S, or D; X4 is R or W; X5 is H or R; X6 is A or S; X7 is Q or R; X8 is A or E; X9 is N or K; X10 is T or A; X11 is S or N; X12 is N or K; X13 is A or D; X14 is G or R; X15 is T or I; X16 is L or I; X17 is W or R; X18 is C, Y, F, or S; X19 is L, or V; X20 is Y or H; X21 is D or N; X22 is Y, F, S, or L; X23 is L or W; X24 is E, A, Or T; X25 is R, L, or W; X26 is L or T; X27 is E OR K; X28 is E or K; X29 is H or P; X30 is R or V; X31 is W or R; X32 is V or M; X33 is E or Q; X34 is M or V; X35 is P or Q; X36 is R or S; and X37 is P or G.

[0104] As an example, an MHC Class I heavy chain polypeptide of a TMMP of the present disclosure can comprise an amino acid sequence having at least 75%, at least 80%, at least 85%, at least 90%, at least 95%, at least 98%, at least 99%, or 100%, amino acid sequence identity to the following human HLA-C heavy chain amino acid sequence:

(SEQ ID NO: 307)
CSHSMRYFDTAVSRPGRGEPRFISVGYVDDTQFVRFDSDAASPRGEPRAPW
VEQEGPEYWDRETQNYKRQAQADRVSLRNLRGYYNQSEDGSHTLQRMYGCD
LGPDGRLLRGYDQSAYDGKDYIALNEDLRSWTAADTAAQITQRKLEAARAA
EQLRAYLEGTCVEWLRRYLENGKETLQRAEPPKTHVTHHPLSDHEATLRCW
ALGFYPAEITLTWQRDGEDQTQDTELVETRPAGDGTFQKWAAVVVPSGQEQ
RYTCHMQHEGLQEPLTLSWEP.

### HLA-C(Y84A; A236C)

[0105] As one non-limiting example, in some cases, the MHC Class I heavy chain polypeptide is an HLA-C polypeptide that comprises Y84A and A236C substitutions. For example, in some cases, the MHC Class I heavy chain polypeptide comprises an amino acid sequence having at least 75%, at least 80%, at least 85%, at least 90%, at least 95%, at least 98%, at least 99%, or 100%, amino acid sequence identity to the following human HLA-C heavy chain (Y84A; A236C) amino acid sequence:

(SEQ ID NO: 308)
CSHSMRYFDTAVSRPGRGEPRFISVGYVDDTQFVRFDSDAASPRGEPRAPW
VEQEGPEYWDRETQNYKRQAQADRVSLRNLRGAYNQSEDGSHTLQRMYGCD
LGPDGRLLRGYDQSAYDGKDYIALNEDLRSWTAADTAAQITQRKLEAARAA
EQLRAYLEGTCVEWLRRYLENGKETLQRAEPPKTHVTHHPLSDHEATLRCW
ALGFYPAEITLTWQRDGEDQTQDTELVETRPCGDGTFQKWAAVVVPSGQEQ
RYTCHMQHEGLQEPLTLSWEP,

where amino acid 84 is Ala and amino acid 236 is Cys. In some cases, the Cys-236 forms an interchain disulfide bond with Cys-12 of a variant β2M polypeptide that comprises an R12C substitution.

### HLA-C(Y84C; A139C)

[0106] In some cases, the MHC Class I heavy chain polypeptide comprises Y84C and A139C substitutions. For example, in some cases, the MHC Class I heavy chain polypeptide comprises an amino acid sequence having at least 75%, at least 80%, at least 85%, at least 90%, at least 95%, at least 98%, at least 99%, or 100%, amino acid sequence identity to the following human HLA-C heavy chain (Y84C; A139C) amino acid sequence:

(SEQ ID NO: 397)
CSHSMRYFDTAVSRPGRGEPRFISVGYVDDTQFVRFDSDAASPRGEPRAPW
VEQEGPEYWDRETQNYKRQAQADRVSLRNLRGCYNQSEDGSHTLQRMYGCD
LGPDGRLLRGYDQSAYDGKDYIALNEDLRSWTAADTCAQITQRKLEAARAA
EQLRAYLEGTCVEWLRRYLENGKETLQRAEPPKTHVTHHPLSDHEATLRCW
ALGFYPAEITLTWQRDGEDQTQDTELVETRPAGDGTFQKWAAVVVPSGQEQ
RYTCHMQHEGLQEPLTLSWEP,

where amino acid 84 is Cys and amino acid 139 is Cys. In some cases, Cys-84 forms an intrachain disulfide bond with Cys-139.

### HLA-C*0701

[0107] In some cases, a MHC Class I heavy chain polypeptide of a TMMP of the present disclosure comprises an amino acid sequence of HLA-C*0701 of FIG. 9A (labeled HLA-C in FIG. 6), or an amino acid sequence having at least 75% (e.g., at least 80%, at least 85%, at least 90%, at least 95%, at least 98%, at least 99%) or 100% amino acid sequence identity to all or part (e.g., 50, 75, 100, 150, 200, or 250 contiguous amino acids) of that sequence (e.g., it may comprise 1-25, 1-5, 5-10, 10-15, 15-20, 20-25, or 25-30 amino acid insertions, deletions, and/or substitutions). In some cases, where the HLA-C heavy chain polypeptide of a TMMP of the present disclosure has less than 100% identity to the sequence labeled HLA-C*0701 in FIG. 9A, it may comprise a mutation at one or more of positions 84, 139 and/or 236 selected from: a tyrosine to alanine substitution at position 84 (Y84A); a tyrosine to cysteine substitution at position 84 (Y84C); an alanine to cysteine at position 139 (A139C); and an alanine to cysteine substitution at position 236 (A236C). In some cases, the HLA-C heavy chain polypeptide of a TMMP of the present disclosure comprises Y84A and A236C substitutions. In some cases, the HLA-C*0701 heavy chain polypeptide of a T-Cell-MMP or its epitope conjugate comprises Y84C and A139C substitutions. In some cases, the HLA-C heavy chain polypeptide of a TMMP of the present disclosure comprises Y84C, A139C, and A236C substitutions.

### Non-Classical HLA-E, -F, and -G MHC Class I Heavy Chains

[0108] In some cases, a TMMP of the present disclosure comprises a non-classical MHC Class I heavy chain polypeptide. Among the non-classical HLA heavy chain polypeptides, or portions thereof, that may be that may be incorporated into a TMMP of the present disclosure include, but are not limited to, those of HLA-E, -F, and -G alleles Amino acid sequences for HLA-E, -F, and -G heavy chain polypeptides, (and the HLA-A, B and C alleles) may be found on the world wide web hla.alleles.org/nomenclature/index.html, the European Bioinformatics Institute (www(dot)ebi(dot)ac(dot)uk), which is part of the European Molecular Biology Laboratory (EMBL), and at the National Center for Biotechnology Information (www(dot)ncbi(dot)nlm(dot)nih(dot)gov).

[0109] Non-limiting examples of suitable HLA-E alleles include, but are not limited to, HLA-E*0101 (HLA-E*01:01:01:01), HLA-E*01:03 (HLA-E*01:03:01:01), HLA-E*01:04, HLA-E*01:05, HLA-E*01:06, HLA-E*01:07, HLA-E*01:09, and HLA-E*01:10. Non-limiting examples of suitable HLA-F alleles include, but are not limited to, HLA-F*0101 (HLA-F*01:01:01:01), HLA-F*01:02, HLA-F*01:03 (HLA-F*01:03:01:01), HLA-F*01:04, HLA-F*01:05, and HLA-F*01:06. Non-limiting examples of suitable HLA-G alleles include, but are not limited to, HLA-G*0101 (HLA-G*01:01:01:01), HLA-G*01:02, HLA-G*01:03 (HLA-G*01:03:01:01), HLA-G*01:04 (HLA-G*01:04:01:01), HLA-G*01:06, HLA-G*01:07, HLA-G*01:08, HLA-G*01:09: HLA-G*01:10, HLA-G*01:10, HLA-G*01:11, HLA-G*01:12, HLA-G*01:14, HLA-G*01:15, HLA-G*01:16, HLA-G*01:17, HLA-G*01:18: HLA-G*01:19, HLA-G*01:20, and HLA-G*01:22. Consensus sequences for those HLA E, —F and -G alleles without all, or substantially all, of the leader, transmembrane and cytoplasmic sequences are provided in FIG. 10, and aligned with consensus sequences of the above-mentioned HLA-A, -B and -C alleles in FIG. 11.

[0110] FIG. 1—provides a consensus sequence for each of HLA-E, -F, and -G with the variable aa positions indicated as “X” residues sequentially numbered and the locations of aas 84, 139 and 236 double underlined.

[0111] FIG. 11 provides an alignment of the consensus amino acid sequences for HLA-A, -B, -C, -E, -F, and -G, which are given in FIGS. 7-11. Variable residues in each sequence are listed as “X” with the sequential numbering removed. As indicated in FIG. 6, the locations of aas 84, 139 and 236 are indicated with their flanking five-amino acid clusters that may be replaced by 1 to 5 amino acids selected independently from (i) any naturally occurring amino acid or (ii) any naturally occurring amino acid except proline or glycine are also shown.

[0112] Any of the above-mentioned HLA-E, -F, and/or -G alleles may comprise a substitution at one or more of positions 84, 139 and/or 236 as shown in FIG. 11 for the consensus sequences. In some cases, the substitutions may be selected from a: position 84 tyrosine to alanine (Y84A) or cysteine (Y84C), or, in the case of HLA-F, an R84A or R84C substitution; a position 139 alanine to cysteine (A139C), or, in the case of HLA-F, a V139C; and an alanine to cysteine substitution at position 236 (A236C). In addition, an HLA-E, —F and/or -G sequence having at least 75% (e.g., at least 80%, at least 85%, at least 90%, at least 95%, at least 98%, at least 99%) or 100% amino acid sequence identity to all or part (e.g., 50, 75, 100, 150, 200, or 250 contiguous amino acids) of any of the consensus sequences of set forth in FIG. 11 may also be employed (e.g., the sequences may comprise 1-25, 1-5, 5-10, 10-15, 15-20, 20-25, or 25-30 amino acid insertions, deletions, and/or substitutions in addition to changes at variable residues listed therein).

### Mouse H2K

[0113] In some cases, a MHC Class I heavy chain polypeptide present in a TMMP of the present disclosure comprises an amino acid sequence of MOUSE H2K (SEQ ID NO:45) (MOUSE H2K in FIG. 6), or a sequence having at least 75%, at least 80%, at least 85%, at least 90%, at least 95%, at least 98%, at least 99%, or 100% amino acid sequence identity to all or part (e.g., 50, 75, 100, 150, 200, or 250 contiguous amino acids) of that sequence (e.g., it may comprise 1-25, 1-5, 5-10, 10-15, 15-20, 20-25, or 25-30 amino acid insertions, deletions, and/or substitutions). In some cases, where the MOUSE H2K heavy chain polypeptide of a TMMP of the present disclosure has less than 100% identity to the sequence labeled MOUSE H2K in FIG. 6, it may comprise a mutation at one or more of positions 84, 139 and/or 236 selected from: a tyrosine to alanine at position 84 (Y84A); a tyrosine to cysteine at position 84 (Y84C); an alanine to cysteine at position 139 (A139C); and an alanine to cysteine substitution at position 236 (A236C). In some cases, the MOUSE H2K heavy chain polypeptide of a TMMP of the present disclosure comprises Y84A and A236C substitutions. In some cases, the MOUSE H2K heavy chain polypeptide of a TMMP of the present disclosure comprises Y84C and A139C substitutions. In some cases, the MOUSE H2K heavy chain polypeptide of a TMMP of the present disclosure comprises Y84C, A139C and A236C substitutions.

### Exemplary Combinations

[0114] Table 1, below, presents various combinations of MHC Class I heavy chain sequence modifications that can be incorporated in a TMMP of the present disclosure.

TABLE 1

| | | | Specific |
|---|---|---|---|
| | HLA Heavy | Sequence | Substitutions at |
| | Chain | Identity | aa positions 84, |
| Entry | Sequence | Range [symbol] | 139 and/or 236 |
| 1 | HLA-A | 75%-99.8%, 80%-99.8%, | None; Y84C; Y84A; |
| | Consensus | 85%-99.8%, 90%-99.8%, | A139C; A236C; |
| | (FIG. 7B) | 95%-99.8%, 98%-99.8%, | (Y84A & A236C); |
| | | or 99%-99.8%; or | (Y84C & A139C); |
| | | 1-25, 1-5, 5-10, 10-15, | or (Y84C, A139C & |
| | | 15-20, or 20-25 aa | A236C) |
| | | insertions, deletions, | |
| | | and/or substitutions | |
| | | (not counting variable | |
| | | residues) | |
| 2 | A*0101, A*0201, | 75%-99.8%, 80%-99.8%, | None; Y84C; Y84A; |
| | A*0301, A*1101, | 85%-99.8%, 90%-99.8%, | A139C; A236C; |
| | A*2402, A*2301, | 95%-99.8%, 98%-99.8%, | (Y84A & A236C); |
| | A*2402, A*2407, | or 99%-99.8%; or | (Y84C & A139C); |
| | A*3303, or | 1-25, 1-5, 5-10, 10-15, | or (Y84C, A139C & |
| | A*3401 | 15-20, or 20-25 aa | A236C) |
| | (FIG. 7A) | insertions, deletions, | |
| | | and/or substitutions | |
| 3 | HLA-B | 75%-99.8%, 80%-99.8%, | None; Y84C; Y84A; |
| | Consensus | 85%-99.8%, 90%-99.8%, | A139C; A236C; |
| | (FIG. 8B) | 95%-99.8%, 98%-99.8%, | (Y84A & A236C); |
| | | or 99%-99.8%; or | (Y84C & A139C); |
| | | 1-25, 1-5, 5-10, 10-15, | or (Y84C, A139C & |
| | | 15-20, or 20-25 aa | A236C) |
| | | insertions, deletions, | |
| | | and/or substitutions | |
| | | (not counting variable | |
| | | residues) | |
| 4 | B*0702, B*0801, | 75%-99.8%, 80%-99.8%, | None; Y84C; Y84A; |
| | B*1502, B*3802, | 85%-99.8%, 90%-99.8%, | A139C; A236C; |
| | B*4001, B*4601, | 95%-99.8%, 98%-99.8%, | (Y84A & A236C); |
| | or B*5301 | or 99%-99.8%; or | (Y84C & A139C); |
| | (FIG. 8A) | 1-25, 1-5, 5-10, 10-15, | or (Y84C, A139C & |
| | | 15-20, or 20-25 aa | A236C) |
| | | insertions, deletions, | |
| | | and/or substitutions | |
| 5 | HLA-C | 75%-99.8%, 80%-99.8%, | None; Y84C; Y84A; |
| | Consensus | 85%-99.8%, 90%-99.8%, | A139C; A236C; |
| | (FIG. 9B) | 95%-99.8%, 98%-99.8%, | (Y84A & A236C); |
| | | or 99%-99.8%; or | (Y84C & A139C); |
| | | 1-25, 1-5, 5-10, 10-15, | or (Y84C, A139C & |
| | | 15-20, or 20-25 aa | A236C) |
| | | insertions, deletions, | |
| | | and/or substitutions | |
| | | (not counting variable | |
| | | residues) | |
| 6 | C*0102, C*0303, | 75%-99.8%, 80%-99.8%, | None; Y84C; Y84A; |
| | C*0304, C*0401, | 85%-99.8%, 90%-99.8%, | A139C; A236C; |
| | C*0602, C*0701, | 95%-99.8%, 98%-99.8%, | (Y84A & A236C); |
| | C*0801, or | or 99%-99.8%; or | (Y84C & A139C); |
| | C*1502 | 1-25, 1-5, 5-10, 10-15, | or (Y84C, A139C & |
| | (FIG. 9A) | 15-20, or 20-25 aa | A236C) |
| | | insertions, deletions, | |
| | | and/or substitutions | |
| 7 | HLA-E, F, or | 75%-99.8%, 80%-99.8%, | None; Y84C; Y84A; |
| | G Consensus | 85%-99.8%, 90%-99.8%, | A139C; A236C; |
| | (FIG. 10) | 95%-99.8%, 98%-99.8%, | (Y84A & A236C); |
| | | or 99%-99.8%; or | (Y84C & A139C); |
| | | 1-25, 1-5, 5-10, 10-15, | or (Y84C, A139C & |
| | | 15-20, or 20-25 aa | A236C) |
| | | insertions, deletions, | |
| | | and/or substitutions | |
| | | (not counting variable | |
| | | residues) | |
| 8 | MOUSE H2K | 75%-99.8%, 80%-99.8%, | None; Y84C; Y84A; |
| | (FIG. 6) | 85%-99.8%, 90%-99.8%, | A139C; A236C; |
| | | 95%-99.8%, 98%-99.8%, | (Y84A & A236C); |
| | | or 99%-99.8%; or | (Y84C & A139C); |
| | | 1-25, 1-5, 5-10, 10-15, | or (Y84C, A139C & |
| | | 15-20, or 20-25 aa | A236C) |
| | | insertions, deletions, | |
| | | and/or substitutions | |

[symbol]

The Sequence Identity Range is the permissible range in sequence identity of a MHC-H polypeptide sequence incorporated into a TMMP relative to the corresponding portion of the sequences listed in FIG. 6-11 not counting the variable residues in the consensus sequences.

### Beta-2 Microglobulin

[0115] A β2-microglobulin (β2M) polypeptide of a TMMP of the present disclosure can be a human β2M polypeptide, a non-human primate β2M polypeptide, a murine β2M polypeptide, and the like. In some instances, a β2M polypeptide comprises an amino acid sequence having at least 75%, at least 80%, at least 85%, at least 90%, at least 95%, at least 98%, at least 99%, or 100%, amino acid sequence identity to a β2M amino acid sequence depicted in FIG. 6. In some instances, a β2M polypeptide comprises an amino acid sequence having at least 75%, at least 80%, at least 85%, at least 90%, at least 95%, at least 98%, at least 99%, or 100%, amino acid sequence identity to amino acids 21 to 119 of a β2M amino acid sequence depicted in FIG. 4.

[0116] In some cases, a suitable β2M polypeptide comprises the following amino acid sequence:

(SEQ ID NO: 311)
IQRTPKIQVY SCHPAENGKS NFLNCYVSGF HPSDIEVDLL
KNGERIEKVE HSDLSFSKDW SFYLLYYTEF TPTEKDEYAC
RVNHVTLSQP KIVKWDRDM;

and the HLA Class I heavy chain polypeptide comprises the following amino acid sequence:

(SEQ ID NO: 309)
GSHSMRYFFTSVSRPGRGEPRFIAVGYVDDTQFVRFDSDAASQRMEPRAPW
IEQEGPEYWDGETRKVKAHSQTHRVDL(aa1){C}(aa2)AGSHTVQRMYG
CDVGSDWRFLRGYHQYAYDGKDYIALKEDLRSW(aa3){C}(aa4))HKWE
AAHVAEQLRAYLEGTCVEWLRRYLENGKETLQRTDAPKTHMTHHAVSDHEA
TLRCWALSFYPAEITLTWQRDGEDQTQDTEL(aa5)(C)(aa6)QKWAAVV
VPSGQEQRYTCHVQHEGLPKPLTLRWEP,

where the cysteine residues indicated as {C} form an disulfide bond between the α1 and α2-1 helices and the (C) residue forms a disulfide bond with the β2M polypeptide cysteine at position 12. In the sequence above, “aa1” is “amino acid cluster 1”; “aa2” is “amino acid cluster 2”; “aa3” is “amino acid cluster 3”; “aa4” is “amino acid cluster 4”; “aa5” is “amino acid cluster 5”; and “aa6” is “amino acid cluster 6”; see, e.g., FIG. 8. Each occurrence of aa1, aa2, aa3, aa4, aa5, and aa6 is and independently selected to be 1-5 amino acid residues, wherein the amino acid residues are i) selected independently from any naturally occurring (e.g., encoded) amino acid or ii) any naturally occurring amino acid except proline or glycine.

[0117] In some cases, an MHC polypeptide comprises a single amino acid substitution relative to a reference MHC polypeptide (where a reference MHC polypeptide can be a wild-type MHC polypeptide), where the single amino acid substitution substitutes an amino acid with a cysteine (Cys) residue. Such cysteine residues, when present in an MHC polypeptide of a first polypeptide of a TMMP of the present disclosure, can form a disulfide bond with a cysteine residue present in a second polypeptide chain of a TMMP of the present disclosure.

[0118] In some cases, a first MHC polypeptide in a first polypeptide of a TMMP of the present disclosure, and/or the second MHC polypeptide in the second polypeptide of a TMMP of the present disclosure, includes an amino acid substitution to substitute an amino acid with a cysteine, where the substituted cysteine in the first MHC polypeptide forms a disulfide bond with a cysteine in the second MHC polypeptide, where a cysteine in the first MHC polypeptide forms a disulfide bond with the substituted cysteine in the second MHC polypeptide, or where the substituted cysteine in the first MHC polypeptide forms a disulfide bond with the substituted cysteine in the second MHC polypeptide.

[0119] For example, in some cases, one of following pairs of residues in an HLA β2-microglobulin and an HLA Class I heavy chain is substituted with cysteines (where residue numbers are those of the mature polypeptide): 1) β2M residue 12, HLA Class I heavy chain residue 236; 2) β2M residue 12, HLA Class I heavy chain residue 237; 3) β2M residue 8, HLA Class I heavy chain residue 234; 4) β2M residue 10, HLA Class I heavy chain residue 235; 5) β2M residue 24, HLA Class I heavy chain residue 236; 6) β2M residue 28, HLA Class I heavy chain residue 232; 7) β2M residue 98, HLA Class I heavy chain residue 192; 8) β2M residue 99, HLA Class I heavy chain residue 234; 9) β2M residue 3, HLA Class I heavy chain residue 120; 10) β2M residue 31, HLA Class I heavy chain residue 96; 11) β2M residue 53, HLA Class I heavy chain residue 35; 12) β2M residue 60, HLA Class I heavy chain residue 96; 13) β2M residue 60, HLA Class I heavy chain residue 122; 14) β2M residue 63, HLA Class I heavy chain residue 27; 15) β2M residue Arg3, HLA Class I heavy chain residue Gly120; 16) β2M residue His31, HLA Class I heavy chain residue Gln96; 17) β2M residue Asp53, HLA Class I heavy chain residue Arg35; 18) β2M residue Trp60, HLA Class I heavy chain residue Gln96; 19) β2M residue Trp60, HLA Class I heavy chain residue Asp122; 20) β2M residue Tyr63, HLA Class I heavy chain residue Tyr27; 21) β2M residue Lys6, HLA Class I heavy chain residue Glu232; 22) β2M residue Gln8, HLA Class I heavy chain residue Arg234; 23) β2M residue Tyr10, HLA Class I heavy chain residue Pro235; 24) β2M residue Ser11, HLA Class I heavy chain residue Gln242; 25) β2M residue Asn24, HLA Class I heavy chain residue Ala236; 26) β2M residue Ser28, HLA Class I heavy chain residue Glu232; 27) β2M residue Asp98, HLA Class I heavy chain residue His192; and 28) β2M residue Met99, HLA Class I heavy chain residue Arg234. The amino acid numbering of the MHC/HLA Class I heavy chain is in reference to the mature MHC/HLA Class I heavy chain, without a signal peptide. For example, in some cases, residue 236 of the mature HLA-A amino acid sequence is substituted with a Cys. In some cases, residue 236 of the mature HLA-B amino acid sequence is substituted with a Cys. In some cases, residue 236 of the mature HLA-C amino acid sequence is substituted with a Cys. In some cases, residue 32 (corresponding to Arg-12 of mature β2M) of an amino acid sequence depicted in FIG. 4 is substituted with a Cys.

[0120] In some cases, a β2M polypeptide comprises the amino acid sequence:

(SEQ ID NO: 310)
IQRTPKIQVY SRHPAENGKS NFLNCYVSGF
HPSDIEVDLLKNGERIEKVE HSDLSFSKDW SFYLLYYTEF
TPTEKDEYAC RVNHVTLSQP KIVKWDRDM.

In some cases, a β2M polypeptide comprises the amino acid sequence:

(SEQ ID NO: 311)
IQRTPKIQVY SCHPAENGKS NFLNCYVSGF
HPSDIEVDLLKNGERIEKVE HSDLSFSKDW SFYLLYYTEF
TPTEKDEYAC RVNHVTLSQP KIVKWDRDM.

[0121] In some cases, an HLA Class I heavy chain polypeptide comprises the amino acid sequence:

(SEQ ID NO: 297)
[sequence omitted]

[0122] In some cases, an HLA Class I heavy chain polypeptide comprises the amino acid sequence:

(SEQ ID NO: 312)
GSHSMRYFFTSVSRPGRGEPRFIAVGYVDDTQFVRFDSDAASQRMEPRAPW
IEQEGPEYWDGETRKVKAHSQTHRVDLGTLRGYYNQSEAGSHTVQRMYGCD
VGSDWRFLRGYHQYAYDGKDYIALKEDLRSWTAADMAAQTTKHKWEAAHVA
EQLRAYLEGTCVEWLRRYLENGKETLQRTDAPKTHMTHHAVSDHEATLRCW
ALSFYPAEITLTWQRDGEDQTQDTELVETRPCGDGTFQKWAAVVVPSGQEQ
RYTCHVQHEGLPKPLTLRWEP.

[0123] In some cases, an HLA Class I heavy chain polypeptide comprises the amino acid sequence:

(SEQ ID NO: 313)
GSHSMRYFFTSVSRPGRGEPRFIAVGYVDDTQFVRFDSDAASQRMEPRAPW
IEQEGPEYWDGETRKVKAHSQTHRVDLGTLRGAYNQSEAGSHTVQRMYGCD
VGSDWRFLRGYHQYAYDGKDYIALKEDLRSWTAADMAAQTTKHKWEAAHVA
EQLRAYLEGTCVEWLRRYLENGKETLQRTDAPKTHMTHHAVSDHEATLRCW
ALSFYPAEITLTWQRDGEDQTQDTELVETRPCGDGTFQKWAAVVVPSGQEQ
RYTCHVQHEGLPKPLTLRWE.

[0124] In some cases, the β2M polypeptide comprises the following amino acid sequence:

(SEQ ID NO: 311)
IQRTPKIQVY SCHPAENGKS NFLNCYVSGF HPSDIEVDLL
KNGERIEKVE HSDLSFSKDW SFYLLYYTEF TPTEKDEYAC
RVNHVTLSQP KIVKWDRDM;

and the HLA Class I heavy chain polypeptide of a TMMP of the present disclosure comprises the following amino acid sequence:

(SEQ ID NO: 312)
GSHSMRYFFTSVSRPGRGEPRFIAVGYVDDTQFVRFDSDAASQRMEPRAPW
IEQEGPEYWDGETRKVKAHSQTHRVDLGTLRGYYNQSEAGSHTVQRMYGCD
VGSDWRFLRGYHQYAYDGKDYIALKEDLRSWTAADMAAQTTKHKWEAAHVA
EQLRAYLEGTCVEWLRRYLENGKETLQRTDAPKTHMTHHAVSDHEATLRCW
ALSFYPAEITLTWQRDGEDQTQDTELVETRPCGDGTFQKWAAVVVPSGQEQ
RYTCHVQHEGLPKPLTLRWEP,

where the Cys residues that are underlined and in bold form a disulfide bond with one another in the TMMP.

[0125] In some cases, the β2M polypeptide comprises the amino acid sequence: IQRTPKIQVYSCHPAENGKSNFLNCYVSGFHPSDIEVDLLKNGERIEKVEHSDLSFSKDWSFYLL YYTEFTPTEKDEYACRVNHVTLSQPKIVKWDRDM (SEQ ID NO:314).

[0126] In some cases, the first polypeptide and the second polypeptide of a TMMP of the present disclosure are disulfide linked to one another through: i) a Cys residue present in a linker connecting the peptide epitope and a β2M polypeptide in the first polypeptide chain; and ii) a Cys residue present in an MHC Class I heavy chain in the second polypeptide chain. In some cases, the Cys residue present in the MHC Class I heavy chain is a Cys introduce as a Y84C substitution. In some cases, the linker connecting the peptide epitope and the β2M polypeptide in the first polypeptide chain is GCGGS(G4S)n (SEQ ID NO:315), where n is 1, 2, 3, 4, 5, 6, 7, 8, or 9. For example, in some cases, the linker comprises the amino acid sequence GCGGSGGGGSGGGGSGGGGS (SEQ ID NO:316). As another example, the linker comprises the amino acid sequence GCGGSGGGGSGGGGS (SEQ ID NO:317). Examples of disulfide-linked first and second polypeptides of a TMMP of the present disclosure are depicted schematically in FIG. 2A-2F.

### Multiple Disulfide Bonded TMMPs

[0127] In some cases, the first polypeptide and the second polypeptide of a TMMP of the present disclosure are linked to one another by at least two disulfide bonds (i.e., two interchain disulfide bonds). Examples of such multiple disulfide-linked TMMP are depicted schematically in FIGS. 12A and 12B and FIG. 13A-13C. In addition, where a TMMP of the present disclosure comprises an IgFc polypeptide, a heterodimeric TMMP can be dimerized, such that disulfide bonds link the IgFc polypeptides in the two heterodimeric TMMPs. Such an arrangement is depicted schematically in FIGS. 12C and 12D, where disulfide bonds are represented by dashed lines. Unless otherwise stated, the at least two disulfide bonds described in the multiple disulfide-linked TMMPPs in this section are not referring to disulfide bonds linking IgFc polypeptides in dimerized TMMPs.

[0128] As noted above, in Wine cases, the first polypeptide and the second polypeptide of a TMMP of the present disclosure are linked to one another by at least two disulfide bonds (i.e., two interchain disulfide bonds). For example, in some instances, the first polypeptide and the second polypeptide of a TMMP of the present disclosure are linked to one another by 2 interchain disulfide bonds. As another example, in some instances, the first polypeptide and the second polypeptide of a TAMP of the present disclosure are linked to one another by 3 interchain disulfide bonds. As another example, in some instances, the first polypeptide and the second polypeptide of a TMMP of the present disclosure are linked to one another by 4 interchain disulfide bonds,

[0129] In some cases where a peptide epitope in a first polypeptide of a TMMP of the present disclosure is linked to a β2M polypeptide by a linker comprising a Cys, at least one of the at least two disulfide bonds links a Cys in the linker to a Cys in an MHC Class I heavy chain in the second polypeptide. In some cases, where a peptide epitope in a first polypeptide of a TMMP of the present disclosure is linked to an MHC Class I heavy chain polypeptide by a linker, at least one of the at least two disulfide bonds links a Cys in the linker to a Cys in a β2M polypeptide present in the second polypeptide.

[0130] In some cases, a multiple disulfide-linked TMMP of the present disclosure (e.g., a double disulfide-linked TMMP) exhibits increased stability, compared to a control TMMP that includes only one of the at least two disulfide bonds. In some cases, a multiple disulfide-linked TMMP (e.g., a double disulfide-linked TMMP) of the present disclosure exhibits increased in vitro stability, compared to a control TMMP that includes only one of the at least two disulfide bonds. For example, in some cases, a multiple disulfide-linked TMMP of the present disclosure (e.g., a double disulfide-linked TMMP) exhibits at least 5%, at least 10%, at least 15%, at least 20%, at least 25%, at least 50%, at least 2-fold, at least 5-fold, or at least 10-fold, greater in vitro stability, compared to a control TMMP that includes only one of the at least two disulfide bonds.

[0131] Whether a multiple disulfide-linked TMMP of the present disclosure exhibits increased in vitro stability, compared to a control TMMP that includes only one of the at least two disulfide bonds, can be determined by measuring the amount disulfide-linked heterodimeric TMMP present in a sample over time and/or under a specified condition and/or during purification of the TMMP.

[0132] For example, in some cases, a multiple disulfide-linked TMMP (e.g., a double disulfide linked TMMP) of the present disclosure exhibits at least 5%, at least 10%, at least 15%, at least 20%, at least 25%, at least 50%, at least 2-fold, at least 5-fold, or at least 10-fold, greater in vitro stability, compared to a control TMMP that includes only one of the at least two disulfide bonds, when the TMMP is stored at 37° C. for a period of time (e.g., for a period of time of from about 1 week to about 2 weeks, from about 2 weeks to about 4 weeks, or from about 4 weeks to about 2 months). For example, in some cases, the amount of disulfide-linked heterodimeric TMMP remaining after storing a multiple disulfide-linked TMMP (e.g., a double disulfide-linked TMMP) of the present disclosure in vitro at 37° C. for 28 days is at least at least 5%, at least 10%, at least 15%, at least 20%, at least 25%, at least 50%, at least 2-fold, at least 5-fold, or at least 10-fold, greater than the amount of disulfide-linked heterodimeric TMMP remaining after storing a control TMMP (a TMMP that includes only one of the at least two disulfide bonds present in the multiple disulfide-linked TMMP) in vitro at 37° C. for 28 days.

[0133] In some cases, a multiple disulfide licked TMMP of the present disclosure exhibits increased in vivo stability, compared to a control TMMP that includes only one of the at least two disulfide bonds. For example, in some cases, a multiple disulfide-linked TMMP of the present disclosure exhibits at least 5%, at least 10%, at least 15%, at least 20%, at least 25%, at least 50%, at least 2-fold, at least 5-fold, or at least 10-fold, greater in vivo stability, compared to a control TMMP that includes only one of the at least two disulfide bonds.

[0134] In some cases, the presence of two disulfide bonds in a multiple disulfide-linked TMMP of the present disclosure (e.g., a double disulfide-linked TMMP) provides for increased production of disulfide-linked heterodimeric TMMP, compared to the amount of disulfide-linked heterodimeric TMMP produced when the TMMP is a control TMMP that includes only one of the at least two disulfide bonds. For example, a multiple disulfide-linked TMMP of the present disclosure (e.g., a double disulfide-linked TMMP) can be produced in a mammalian cell in in vitro cell culture, where the mammalian cell is cultured in a liquid cell culture medium. The TMMP can be secreted into the cell culture medium. The cells can be lysed, generating a cell lysate, and the TMMP can be present in the cell lysate. The TMMP can be purified from the cell culture medium and/or the cell lysate. For example, where the TMMP comprises an IgG1 Fc polypeptide, the cell culture medium and/or the cell lysate can be contacted with immobilized protein A (e.g., the cell culture medium and/or the cell lysate can be applied to a protein A column, where protein A is immobilized onto beads). TMMP present in the cell culture medium and/or the cell lysate becomes bound to the immobilized protein A. After washing the column to remove unbound materials, the bound. TMMP is eluted, generating a protein A eluate. The amount of disulfide-linked heterodimeric TMMP present in the protein A eluate is a least 0.5%, at least 1%, at least 2%, at least 3%, at least 4%, at least 5%, at least 6%, at least 7%, at least 8%, at least 9%, or at least 10%, higher than the amount of disulfide-linked heterodimeric TMMP present in the protein A eluate when the TMMP is a control TMMP that includes only one of the at least two disulfide bonds present in the multiple disulfide-linked TMMP (e.g., a double disulfide-linked TMMP). In some cases, the percent the total TMMP protein in the eluate that is non-aggregated disulfide-linked heterodimeric TMMP is at least 70%, at least 75%, at least 80%, at least 85%, at least 90%, at least 95%, or at least 99%. The protein A eluate can be subjected to size exclusion chromatography (SEC) and/or one or more other additional purification steps.

[0135] In some cases, a T-cell modulatory multimeric polypeptide of the present disclosure comprises at least one heterodimer comprising: a) a first polypeptide comprising: i) a peptide epitope, where the peptide has a length of at least 4 amino acids (e.g., from 4 amino acids to 25 amino acids; e.g., the peptide has a length of 4, 5, 6, 7, 8, 9, 10-15, 15-20, or 20-25 amino acids); and ii) first MHC polypeptide; b) a second polypeptide comprising a second MHC polypeptide, and c) at least one immunomodulatory polypeptide, where the first and/or the second polypeptide comprises the immunomodulatory polypeptide, and where the heterodimer comprises at least two disulfide bonds (e.g., two disulfide bonds) between the first polypeptide and the second polypeptide (e.g., the heterodimer comprises: i) a first disulfide bond linking the first polypeptide and the second polypeptide; and ii) a second disulfide bond linking the first polypeptide and the second polypeptide). Expressed another way, the first polypeptide comprises a first Cys residue that forms a disulfide bond (a first disulfide bond) with a first Cys residue in the second polypeptide; and the first polypeptide comprises a second Cys residue that forms a disulfide bond (a second disulfide bond) with a second Cys residue in the second polypeptide.

[0136] In some cases, a TMMP of the present disclosure comprises: a) a first polypeptide comprising, in order from N-terminus to C-terminus: i) a peptide epitope; ii) a peptide linker: and iii) a polypeptide; and b) a second polypeptide comprising an MHC Class I heavy chain polypeptide, where one or both of the first and the second polypeptides comprises at least one immunomodulatory polypeptide, where the TMMP comprises: a) a first disulfide linkage between: i) a Cys present in the linker between the peptide epitope and the β2M polypeptide; and ii) a first Cys introduced into the MHC Class I heavy chain polypeptide; and b) at least a second disulfide linkage between the first polypeptide and the second polypeptide, where the at least a second disulfide linkage is between: i) a Cys in the first polypeptide that is C-terminal to the Cys present in the linker; and ii) a Cys in the second polypeptide that is C-terminal to the first Cys introduced into the MHC Class I heavy chain polypeptide.

[0137] In some cases, a first and a second disulfide bond-forming Cys residues in a first or a second polypeptide of a TMMP of the present disclosure are from about 10 amino acids to about 200 amino acids apart from one another. For example, in some cases, a first and a second disulfide bond-forming Cys residues in a first or a second polypeptide of a TMMP are from about 10 amino acids (aa) to about 15 aa, from about 15 aa to about 20 aa, from about 20 aa to about 25 aa, from about 25 aa to about 30 aa, from about 30 aa to about 40 aa, from about 40 aa to about 50 aa, from about 50 aa to about 60 aa, from about 60 aa to about 70 aa, from about 70 aa to about 80 aa, from about 80 aa to about 90 aa, from about 90 aa to about 100 aa, from about 100 aa to about 110 aa, from about 110 aa to about 120 aa, from about 120 aa to about 130 aa, from about 130 aa to about 140 aa, from about 140 aa to about 150 aa, from about 150 aa to about 160 aa, from about 160 aa to about 170 aa, from about 170 aa to about 180 aa, from about 180 aa to about 190 aa, or from about 190 aa to about 200 aa.

[0138] As an example, in some cases, the first and second disulfide bond-forming Cys residues in the first polypeptide of a TMMP of the present disclosure are from about 10 amino acids to about 80 amino acid residues apart from one another. For example, in some cases, the second disulfide bond-forming Cys residue in the first polypeptide is from about 10 amino acids to about 80 amino acids (e.g., from about 10 amino acids (aa) to about 15 aa, from about 15 aa to about 20 aa, from about 20 aa to about 25 aa, from about 25 aa to about 30 aa, from about 30 aa to about 40 aa, from about 40 aa to about 50 aa, from about 50 aa to about 60 aa, from about 60 aa to about 70 aa, or from about 70 aa to about 80 aa) C-terminal to the first disulfide bond-forming Cys residue in the first polypeptide. In some cases, the second disulfide bond-forming Cys residue in the first polypeptide is 10 aa, 11 aa, 12 aa, 13 aa, 14 aa, 15 aa, 16 aa, 17 aa, 18 aa, 19 aa, 20 aa, 21 aa, 22 aa, 23 aa, 24 aa, or 25 aa, C-terminal to the first disulfide bond-forming Cys residue in the first polypeptide. In some cases, the second disulfide bond-forming Cys residue in the first polypeptide is 15 aa C-terminal to the first disulfide bond-forming Cys residue in the first polypeptide. In some cases, the second disulfide bond-forming Cys residue in the first polypeptide is 20 aa C-terminal to the first disulfide bond-forming Cys residue in the first polypeptide. In some cases, the second disulfide bond-forming Cys residue in the first polypeptide is 25 aa C-terminal to the first disulfide bond-forming Cys residue in the first polypeptide.

[0139] As another example, in some cases, the first and second disulfide bond-forming Cys residues in the second polypeptide of a TMMP of the present disclosure are from about 140 amino acids to about 160 amino acids apart from one another. For example, in some cases, the second disulfide bond-forming Cys residue in the second polypeptide is from about 140 amino acids to about 160 amino acids C-terminal to the first disulfide bond-forming Cys residue in the second polypeptide. In some cases, the second disulfide bond-forming Cys residue in the second polypeptide is 140 amino acids (aa), 141 aa, 142 aa, 143 aa, 144 aa, 145 aa, 146 aa, 147 aa, 148 aa, 149 aa, 150 aa, 151 aa, 152 aa, 153 aa, 154 aa, 155 aa, 156 aa, 157 aa, 158 aa, 159 aa, or 160 aa, C-terminal to the first disulfide bond-forming Cys residue in the second polypeptide.

[0140] A multiple disulfide-linked TMMP of the present disclosure (e.g., a double disulfide-linked TMMP) can comprise, for example: a) a first polypeptide comprising: i) a peptide epitope (e.g., a peptide of from 4 amino acids to about 25 amino acids that is bound by a TCR when the peptide is complexed with MHC polypeptides); and ii) a first MHC polypeptide, where the first polypeptide comprises a peptide linker between the peptide and the first MHC polypeptide, where the peptide linker comprises a Cys residue, and where the first MHC polypeptide is a β2M polypeptide that comprises an amino acid substitution that introduces a Cys residue; b) and a second polypeptide comprising a second MHC polypeptide, where the second MHC polypeptide is a Class I heavy chain comprising a Y84C substitution and an A236C substitution, based on the amino acid numbering of HLA-A*0201 (depicted in FIG. 7A), or at corresponding positions in another Class I heavy chain allele, where the TMMP comprises a disulfide bond between the Cys residue in the peptide linker and the Cys residue at amino acid position 84 of the Class I heavy chain or corresponding position of another Class I heavy chain allele, and where the TMMP comprises a disulfide bond between the introduced Cys residue in the β2M polypeptide and the Cys at amino acid position 236 of the Class I heavy chain or corresponding position of another Class I heavy chain allele; and c) at least one immunomodulatory polypeptide, where the first and/or the second polypeptide comprises the at least one immunomodulatory polypeptide. Examples are depicted schematically in FIG. 12A and FIG. 12B.

[0141] In some cases, the peptide linker comprises the amino acid sequence GCGGS (SEQ ID NO:318). In some cases, the peptide linker comprises the amino acid sequence GCGGS(GGGGS)n (SEQ ID NO:319), where n is an integer from 1 to 10. In some cases, the peptide linker comprises the amino acid sequence GCGGS(GGGGS)n (SEQ ID NO:398), where n is 1. In some cases, the peptide linker comprises the amino acid sequence GCGGS(GGGGS)n (SEQ ID NO:320), where n is 2. In some cases, the peptide linker comprises the amino acid sequence GCGGS(GGGGS)n (SEQ ID NO:321), where n is 3. In some cases, the peptide linker comprises the amino acid sequence GCGGS(GGGGS)n (SEQ ID NO:322), where n is 4. In some cases, the peptide linker comprises the amino acid sequence GCGGS(GGGGS)n (SEQ ID NO:323), where n is 5. In some cases, the peptide linker comprises the amino acid sequence GCGGS(GGGGS)n (SEQ ID NO:324), where n is 6. In some cases, the peptide linker comprises the amino acid sequence GCGGS(GGGGS)n (SEQ ID NO:325), where n is 7. In some cases, the peptide linker comprises the amino acid sequence GCGGS(GGGGS)n (SEQ ID NO:326), where n is 8. In some cases, the peptide linker comprises the amino acid sequence GCGGS(GGGGS)n (SEQ ID NO: 327), where n is 9. In some cases, the peptide linker comprises the amino acid sequence GCGGS(GGGGS)n (SEQ ID NO:328), where n is 10.

[0142] In some cases, the peptide linker comprises the amino acid sequence CGGGS (SEQ ID NO:329). In some cases, the peptide linker comprises the amino acid sequence CGGGS(GGGGS)n (SEQ ID NO: 330), where n is an integer from 1 to 10. In some cases, the peptide linker comprises the amino acid sequence CGGGS(GGGGS)n (SEQ ID NO:331), where n is 1. In some cases, the peptide linker comprises the amino acid sequence CGGGS(GGGGS)n (SEQ ID NO:332), where n is 2. In some cases, the peptide linker comprises the amino acid sequence CGGGS(GGGGS)n (SEQ ID NO:333), where n is 3. In some cases, the peptide linker comprises the amino acid sequence CGGGS(GGGGS)n (SEQ ID NO:334), where n is 4. In some cases, the peptide linker comprises the amino acid sequence CGGGS(GGGGS)n (SEQ ID NO:335), where n is 5. In some cases, the peptide linker comprises the amino acid sequence CGGGS(GGGGS)n (SEQ ID NO:336), where n is 6. In some cases, the peptide linker comprises the amino acid sequence CGGGS(GGGGS)n (SEQ ID NO:337), where n is 7. In some cases, the peptide linker comprises the amino acid sequence CGGGS(GGGGS)n (SEQ ID NO:338), where n is 8. In some cases, the peptide linker comprises the amino acid sequence CGGGS(GGGGS)n (SEQ ID NO:339), where n is 9. In some cases, the peptide linker comprises the amino acid sequence CGGGS(GGGGS)n (SEQ ID NO:340), where n is 10.

[0143] The following are non-limiting examples of MHC Class I heavy chain comprising a Y84C substitution and an A236C substitution, based on the amino acid numbering of HLA-A*0201 (depicted in FIG. 7A), or at corresponding positions in another Class I heavy chain allele.

### HLA-A

[0144] In some cases, a multiple disulfide-linked TMMP of the present disclosure (e.g., a double disulfide-linked TMMP) comprises: a) a first polypeptide comprising: i) a peptide (e.g., a peptide of from 4 amino acids to about 25 amino acids that is bound by a TCR when the peptide is complexed with MHC polypeptides); and ii) a first MHC polypeptide, where the first polypeptide comprises a peptide linker between the peptide and the first MHC polypeptide, where the peptide linker comprises a Cys residue, and where the first MHC polypeptide is a β2M polypeptide that comprises an amino acid substitution that introduces a Cys residue; and b) a second polypeptide comprising an HLA-A MHC Class I heavy chain comprising an amino acid sequence having at least 60%, at least 70%, at least 80%, at least 90%, at least 95%, at least 98%, at least 99%, or 100%, amino acid sequence identity to the following amino acid sequence:

(SEQ ID NO: 341)
GSHSMRYFFTSVSRPGRGEPRFIAVGYVDDTQFVRFDSDAASQRMEPRAPW
IEQEGPEYWDGETRKVKAHSQTHRVDLGTLRGCYNQSEAGSHTVQRMYGCD
VGSDWRFLRGYHQYAYDGKDYIALKEDLRSWTAADMAAQTTKHKWEAAHVA
EQLRAYLEGTCVEWLRRYLENGKETLQRTDAPKTHMTHHAVSDHEATLRCW
ALSFYPAEITLTWQRDGEDQTQDTELVETRPCGDGTFQKWAAVVVPSGQEQ
RYTCHVQHEGLPKPLTLRWEP,

where amino acid 84 is a Cys and amino acid 236 is a Cys; and c) at least one immunomodulatory polypeptide, where the first and/or the second polypeptide comprises the at least one immunomodulatory polypeptide. In some cases, the peptide linker comprises the amino acid sequence GCGGS (SEQ ID NO:318). In some cases, the peptide linker comprises the amino acid sequence GCGGS(GGGGS)n (SEQ ID NO: 319), where n is an integer from 1 to 10. In some cases, the β2M polypeptide comprises an R12C substitution. For example, the β2M polypeptide can comprises an amino acid sequence having at least 90%, at least 95%, at least 98%, at least 99%, or 100%, amino acid sequence identity to the following amino acid sequence:

(SEQ ID NO: 314)
IQRTPKIQVYSCHPAENGKSNFLNCYVSGFHPSDIEVDLLKNGERIEKVEH
SDLSFSKDWSFYLLYYTEFTPTEKDEYACRVNHVTLSQPKIVKWDRDM,

where amino acid 12 is a Cys. The at least one immunomodulatory polypeptide can be a polypeptide that exerts an activating/stimulating effect on the target T cell or a suppressing/inhibitory effect on the target T cell. For example, the at least one immunomodulatory polypeptide can be a cytokine (e.g., an IL2 polypeptide, an IL7 polypeptide, an IL12 polypeptide, an IL15 polypeptide, an IL17 polypeptide, an IL21 polypeptide, an IL27 polypeptide, an IL-23 polypeptide, a TGFβ polypeptide, and the like; and including all family members, e.g., IL17A, IL-17B, IL-17C, IL-17D, IL-17E, IL-17F, IL-17E), a 4-1BBL polypeptide, an ICOS-L polypeptide, an OX-40L polypeptide, a CD80 polypeptide, a CD86 polypeptide, (CD80 and CD86 are also known as B7-1 and B7-2, respectively), a CD40 polypeptide, a CD70 polypeptide, a JAG1 (CD339) polypeptide, an ICAM (CD540 polypeptide, a PD-L1 polypeptide, a FasL polypeptide, a PD-L2 polypeptide, a PD-1H (VISTA) polypeptide, an ICOS-L (CD275) polypeptide, a GITRL polypeptide, an HVEM polypeptide, a CXCL10 polypeptide, a CXCL9 polypeptide, a CXCL11 polypeptide, a CXCL13 polypeptide, and a CX3CL1 polypeptide, a Galectin-9 polypeptide, a CD83 polypeptide, a CD30L polypeptide, a HLA-G polypeptide, a MICA polypeptide, a MICB polypeptide, a HVEM (CD270) polypeptide, a lymphotoxin beta receptor polypeptide, a 3/TR6 polypeptide, an ILT3 polypeptide, an ILT4 polypeptide, a CXCL10 polypeptide, a CXCL9 polypeptide, a CXCL11 polypeptide, a CXCL13 polypeptide, or a CX3CL1 polypeptide. These immunomodulatory polypeptides may be the wild type polypeptide or a variant of a wild type polypeptide. In some cases, the immunomodulatory polypeptide is an activating (“stimulatory”) immunomodulatory polypeptide; e.g., the immunomodulatory polypeptide may produce an activating/stimulating effect on a T cell. Examples of activating immunomodulatory polypeptides include, e.g., CD80, CD86, 4-1BBL, OX40L, CD70, ICOS-L, CD40, ICAM (CD54), IL2, IL7, IL12, IL15, IL17, IL21, IL27, IL23, GITRL, TGFβ, and lymphotoxin beta receptor. In some cases, the immunomodulatory polypeptide is an inhibitory (“suppressing”) immunomodulatory polypeptide; e.g., the immunomodulatory polypeptide s may produce a suppressing/inhibitory effect on a T cell. Examples of inhibitory immunomodulatory polypeptides include, e.g., PD-1H, PD-L1, PD-L2, TGFβ, FasL, HVEM, Galectin-9, ILT3, and ILT4. TGFβ polypeptides may produce either an activating/stimulating effect or a suppressing/inhibitory effect, depending on the context. In some cases, the at least one immunomodulatory polypeptide is a reduced affinity variant, as described elsewhere herein. In some cases, the first or the second polypeptide comprises an Ig Fc polypeptide.

[0145] In some cases, a multiple disulfide-linked TMMP of the present disclosure (e.g., a double disulfide-linked TMMP) comprises an HLA-A Class I heavy chain polypeptide. In some cases, the HLA-A heavy chain polypeptide present in a multiple disulfide-linked TMMP of the present disclosure (e.g., a double disulfide-finked TMMP) comprises an amino acid sequence having at least 95%, at least 98%, or at least 99%, amino acid sequence identity to the HLA-A*0101, HLA-A*0201, HLA-A*0202, HLA-A*1101, HLA-A*2301, HLA-A*2402, HLA-A*2407, HLA-A*3303, or HLA-A*3401 amino acid sequence depicted in FIG. 7A, where the HLA-A heavy chain polypeptide comprises Y84C and A236C substitutions.

### HLA-A*0101 (Y84C; A236C)

[0146] In some cases, the HLA-A heavy chain polypeptide present in a multiple disulfide-linked TMMP of the present disclosure (e.g., a double disulfide-linked TMMP) comprises an amino acid sequence having at least 95%, at least 98%, at least 99%, or 100%, amino acid sequence identity to the following HLA-A*0101 (Y84C; A236C) amino acid sequence:

(SEQ ID NO: 343)
GSHSMRYFFTSVSRPGRGEPRFIAVGYVDDTQFVRFDSDAASQKMEPRAPW
IEQEGPEYWDQETRNMKAHSQTDRANLGTLRGCYNQSEDGSHTIQIMYGCD
VGPDGRFLRGYRQDAYDGKDYIALNEDLRSWTAADMAAQITKRKWEAVHAA
EQRRVYLEGRCVDGLRRYLENGKETLQRTDPPKTHMTHHPISDHEATLRCW
ALGFYPAEITLTWQRDGEDQTQDTELVETRPCGDGTFQKWAAVVVPSGEEQ
RYTCHVQHEGLPKPLTLRWE,

where amino acid 84 is a Cys and amino acid 236 is a Cys.

### HLA-A*0201 (Y84C; A236C)

[0147] In some cases, the HLA-A heavy chain polypeptide present in a multiple disulfide-linked TMMP of the present disclosure (e.g., a double disulfide-linked TMMP) comprises an amino acid sequence having at least 95%, at least 98%, at least 99%, or 100%, amino acid sequence identity to the following HLA-A*0201 (Y84C; A236C) amino acid sequence:

(SEQ ID NO: 341)
GSHSMRYFFTSVSRPGRGEPRFIAVGYVDDTQFVRFDSDAASQRMEPRAPW
IEQEGPEYWDGETRKVKAHSQTHRVDLGTLRGCYNQSEAGSHTVQRMYGCD
VGSDWRFLRGYHQYAYDGKDYIALKEDLRSWTAADMAAQTTKHKWEAAHVA
EQLRAYLEGTCVEWLRRYLENGKETLQRTDAPKTHMTHHAVSDHEATLRCW
ALSFYPAEITLTWQRDGEDQTQDTELVETRPCGDGTFQKWAAVVVPSGQEQ
RYTCHVQHEGLPKPLTLRWEP,

where amino acid 84 is a Cys and amino acid 236 is a Cys.

### HLA-A*0202 (Y84C; A236C)

[0148] In some cases, the HLA-A heavy chain polypeptide present in a multiple disulfide-linked TMMP of the present disclosure (e.g., a double disulfide-linked TMMP) comprises an amino acid sequence having at least 95%, at least 98%, at least 99%, or 100%, amino acid sequence identity to the following HLA-A*0202 (Y84C; A236C) amino acid sequence:

(SEQ ID NO: 341)
GSHSMRYFFTSVSRPGRGEPRFIAVGYVDDTQFVRFDSDAASQRMEPRAPW
IEQEGPEYWDGETRKVKAHSQTHRVDLGTLRGCYNQSEAGSHTVQRMYGCD
VGSDWRFLRGYHQYAYDGKDYIALKEDLRSWTAADMAAQTTKHKWEAAHVA
EQLRAYLEGTCVEWLRRYLENGKETLQRTDAPKTHMTHHAVSDHEATLRCW
ALSFYPAEITLTWQRDGEDQTQDTELVETRPCGDGTFQKWAAVVVPSGQEQ
RYTCHVQHEGLPKPLTLRWE,

where amino acid 84 is a Cys and amino acid 236 is a Cys.

### HLA-A*1101 (Y84C; A236C)

[0149] In some cases, the HLA-A heavy chain polypeptide present in a multiple disulfide-linked TMMP of the present disclosure (e.g., a double disulfide-linked TMMP) comprises an amino acid sequence having at least 95%, at least 98%, at least 99%, or 100%, amino acid sequence identity to the following HLA-A*1101 (Y84C; A236C) amino acid sequence:

(SEQ ID NO: 344)
GSHSMRYFYTSVSRPGRGEPRFIAVGYVDDTQFVRFDSDAASQRMEPRAPW
IEQEGPEYWDQETRNVKAQSQTDRVDLGTLRGCYNQSEDGSHTIQIMYGCD
VGPDGRFLRGYRQDAYDGKDYIALNEDLRSWTAADMAAQITKRKWEAAHAA
EQQRAYLEGRCVEWLRRYLENGKETLQRTDPPKTHMTHHPISDHEATLRCW
ALGFYPAEITLTWQRDGEDQTQDTELVETRPCGDGTFQKWAAVVVPSGEEQ
RYTCHVQHEGLPKPLTLRWE,

where amino acid 84 is a Cys and amino acid 236 is a Cys.

### HLA-A*2301 (Y84C; A236C)

[0150] In some cases, the HLA-A heavy chain polypeptide present in a multiple disulfide-linked TMMP of the present disclosure (e.g., a double disulfide-linked TMMP) comprises an amino acid sequence having at least 95%, at least 98%, at least 99%, or 100%, amino acid sequence identity to the following HLA-A*2301 (Y84C; A236C) amino acid sequence:

(SEQ ID NO: 345)
GSHSMRYFSTSVSRPGRGEPRFIAVGYVDDTQFVRFDSDAASQRMEPRAPW
IEQEGPEYWDEETGKVKAHSQTDRENLRIALRCYNQSEAGSHTLQMMFGCD
VGSDGRFLRGYHQYAYDGKDYIALKEDLRSWTAADMAAQITQRKWEAARVA
EQLRAYLEGTCVDGLRRYLENGKETLQRTDPPKTHMTHHPISDHEATLRCW
ALGFYPAEITLTWQRDGEDQTQDTELVETRPCGDGTFQKWAAVVVPSGEEQ
RYTCHVQHEGLPKPLTLRWE,

where amino acid 84 is a Cys and amino acid 236 is a Cys.

### HLA-A*2402 (Y84C; A236C)

[0151] In some cases, the HLA-A heavy chain polypeptide present in a multiple disulfide-linked TMMP of the present disclosure (e.g., a double disulfide-linked TMMP) comprises an amino acid sequence having at least 95%, at least 98%, at least 99%, or 100%, amino acid sequence identity to the following HLA-A*2402 (Y84C; A236C) amino acid sequence:

(SEQ ID NO: 346)
GSHSMRYFSTSVSRPGRGEPRFIAVGYVDDTQFVRFDSDAASQRMEPRAPW
IEQEGPEYWDEETGKVKAHSQTDRENLRIALRCYNQSEAGSHTLQMMFGCD
VGSDGRFLRGYHQYAYDGKDYIALKEDLRSWTAADMAAQITKRKWEAAHVA
EQQRAYLEGTCVDGLRRYLENGKETLQRTDPPKTHMTHHPISDHEATLRCW
ALGFYPAEITLTWQRDGEDQTQDTELVETRPCGDGTFQKWAAVVVPSGEEQ
RYTCHVQHEGLPKPLTLRWE,

where amino acid 84 is a Cys and amino acid 236 is a Cys.

### HLA-A*2407 (Y84C; A236C)

[0152] In some cases, the HLA-A heavy chain polypeptide present in a multiple disulfide-linked TMMP of the present disclosure (e.g., a double disulfide-linked TMMP) comprises an amino acid sequence having at least 95%, at least 98%, at least 99%, or 100%, amino acid sequence identity to the following HLA-A*2407 (Y84C; A236C) amino acid sequence:

(SEQ ID NO: 347)
GSHSMRYFSTSVSRPGRGEPRFIAVGYVDDTQFVRFDSDAASQRMEPRAPW
IEQEGPEYWDEETGKVKAQSQTDRENLRIALRCYNQSEAGSHTLQMMFGCD
VGSDGRFLRGYHQYAYDGKDYIALKEDLRSWTAADMAAQITKRKWEAAHVA
EQQRAYLEGTCVDGLRRYLENGKETLQRTDPPKTHMTHHPISDHEATLRCW
ALGFYPAEITLTWQRDGEDQTQDTELVETRPCGDGTFQKWAAVVVPSGEEQ
RYTCHVQHEGLPKPLTLRWE,

where amino acid 84 is a Cys and amino acid 236 is a Cys.

### HLA-A*3303 (Y84C; A236C)

[0153] In some cases, the HLA-A heavy chain polypeptide present in a multiple disulfide-linked TMMP of the present disclosure (e.g., a double disulfide-linked TMMP) comprises an amino acid sequence having at least 95%, at least 98%, at least 99%, or 100%, amino acid sequence identity to the following HLA-A*3303 (Y84C; A236C) amino acid sequence:

(SEQ ID NO: 348)
GSHSMRYFTTSVSRPGRGEPRFIAVGYVDDTQFVRFDSDAASQRMEPRAPW
IEQEGPEYWDRNTRNVKAHSQIDRVDLGTLRGCYNQSEAGSHTIQMMYGCD
VGSDGRFLRGYQQDAYDGKDYIALNEDLRSWTAADMAAQITQRKWEAARVA
EQLRAYLEGTCVEWLRRYLENGKETLQRTDPPKTHMTHHAVSDHEATLRCW
ALSFYPAEITLTWQRDGEDQTQDTELVETRPCGDGTFQKWASVVVPSGQEQ
RYTCHVQHEGLPKPLTLRWE,

where amino acid 84 is a Cys and amino acid 236 is a Cys.

### HLA-A*3401 (Y84C; A236C)

[0154] In some cases, the HLA-A heavy chain polypeptide present in a multiple disulfide-linked TMMP of the present disclosure (e.g., a double disulfide-linked TMMP) comprises an amino acid sequence having at least 95%, at least 98%, at least 99%, or 100%, amino acid sequence identity to the following HLA-A*3401 (Y84C; A236C) amino acid sequence:

(SEQ ID NO: 349)
GSHSMRYFYTSVSRPGRGEPRFIAVGYVDDTQFVRFDSDAASQRMEPRAPW
IEQEGPEYWDRNTRKVKAQSQTDRVDLGTLRGCYNQSEDGSHTIQRMYGCD
VGPDGRFLRGYQQDAYDGKDYIALNEDLRSWTAADMAAQITQRKWETAHEA
EQWRAYLEGTCVEWLRRYLENGKETLQRTDAPKTHMTHHAVSDHEATLRCW
ALSFYPAEITLTWQRDGEDQTQDTELVETRPCGDGTFQKWASVVVPSGQEQ
RYTCHVQHEGLPKPLTLRWE,

where amino acid 84 is a Cys and amino acid 236 is a Cys.

### HLA-B

[0155] In some cases, a multiple disulfide-linked TMMP of the present disclosure (e.g., a double disulfide-linked TMMP) comprises: a) a first polypeptide comprising: i) a peptide (e.g., a peptide of from 4 amino acids to about 25 amino acids that is bound by a TCR when the peptide is complexed with MHC polypeptides); and ii) a first MHC polypeptide, where the first polypeptide comprises a peptide linker between the peptide and the first MHC polypeptide, where the peptide linker comprises a Cys residue, and where the first MHC polypeptide is a β2M polypeptide that comprises an amino acid substitution that introduces a Cys residue; and b) a second polypeptide comprising an HLA-B MHC Class I heavy chain comprising an amino acid sequence having at least 60%, at least 70%, at least 80%, at least 90%, at least 95%, at least 98%, at least 99%, or 100%, amino acid sequence identity to the following amino acid sequence:

(SEQ ID NO: 350)
GSHSMRYFYTSVSRPGRGEPRFISVGYVDDTQFVRFDSDAASPREEPRAPW
IEQEGPEYWDRNTQIYKAQAQTDRESLRNLRGCYNQSEAGSHTLQSMYGCD
VGPDGRLLRGHDQYAYDGKDYIALNEDLRSWTAADTAAQITQRKWEAAREA
EQRRAYLEGECVEWLRRYLENGKDKLERADPPKTHVTHHPISDHEATLRCW
ALGFYPAEITLTWQRDGEDQTQDTELVETRPCGDRTFQKWAAVVVPSGEEQ
RYTCHVQHEGLPKPLTLRWEP,

where amino acid 84 is a Cys and amino acid 236 is a Cys; and c) at least one immunomodulatory polypeptide, where the first and/or the second polypeptide comprises the at least one immunomodulatory polypeptide. In some cases, the peptide linker comprises the amino acid sequence GCGGS (SEQ ID NO:318). In some cases, the peptide linker comprises the amino acid sequence GCGGS(GGGGS)n (SEQ ID NO:342), where n is an integer from 1 to 10. In some cases, the β2M polypeptide comprises an R12C substitution. For example, the β2M polypeptide can comprises an amino acid sequence having at least 90%, at least 95%, at least 98%, at least 99%, or 100%, amino acid sequence identity to the following amino acid sequence:

(SEQ ID NO: 314)
IQRTPKIQVYSCHPAENGKSNFLNCYVSGFHPSDIEVDLLKNGERIEKVEH
SDLSFSKDWSFYLLYYTEFTPTEKDEYACRVNHVTLSQPKIVKWDRDM,

where amino acid 12 is a Cys. The at least one immunomodulatory polypeptide can be a polypeptide that exerts an activating/stimulating effect on the target T cell or a suppressing/inhibitory effect on the target T cell. For example, the at least one immunomodulatory polypeptide can be a cytokine (e.g., an IL2 polypeptide, an IL7 polypeptide, an IL12 polypeptide, an IL15 polypeptide, an IL17 polypeptide, an IL21 polypeptide, an IL27 polypeptide, an IL-23 polypeptide, a TGFβ polypeptide, and the like; and including all family members, e.g., IL17A, IL-17B, IL-17C, IL-17D, IL-17E, IL-17F, IL-17E), a 4-1BBL polypeptide, an ICOS-L polypeptide, an OX-40L polypeptide, a CD80 polypeptide, a CD86 polypeptide, (CD80 and CD86 are also known as B7-1 and B7-2, respectively), a CD40 polypeptide, a CD70 polypeptide, a JAG1 (CD339) polypeptide, an ICAM (CD540 polypeptide, a PD-L1 polypeptide, a FasL polypeptide, a PD-L2 polypeptide, a PD-1H (VISTA) polypeptide, an ICOS-L (CD275) polypeptide, a GITRL polypeptide, an HVEM polypeptide, a CXCL10 polypeptide, a CXCL9 polypeptide, a CXCL11 polypeptide, a CXCL13 polypeptide, and a CX3CL1 polypeptide, a Galectin-9 polypeptide, a CD83 polypeptide, a CD30L polypeptide, a HLA-G polypeptide, a MICA polypeptide, a MICB polypeptide, a HVEM (CD270) polypeptide, a lymphotoxin beta receptor polypeptide, a 3/TR6 polypeptide, an ILT3 polypeptide, an ILT4 polypeptide, a CXCL10 polypeptide, a CXCL9 polypeptide, a CXCL11 polypeptide, a CXCL13 polypeptide, or a CX3CL1 polypeptide. These immunomodulatory polypeptides may be the wild type polypeptide or a variant of a wild type polypeptide. In some cases, the immunomodulatory polypeptide is an activating (“stimulatory”) immunomodulatory polypeptide; e.g., the immunomodulatory polypeptide may produce an activating/stimulating effect on a T cell. Examples of activating immunomodulatory polypeptides include, e.g., CD80, CD86, 4-1BBL, OX40L, CD70, ICOS-L, CD40, ICAM (CD54), IL2, IL7, IL12, IL15, IL17, IL21, IL27, IL23, GITRL, TGFβ, and lymphotoxin beta receptor. In some cases, the immunomodulatory polypeptide is an inhibitory (“suppressing”) immunomodulatory polypeptide; e.g., the immunomodulatory polypeptide s may produce a suppressing/inhibitory effect on a T cell. Examples of inhibitory immunomodulatory polypeptides include, e.g., PD-1H, PD-L1, PD-L2, TGFβ, FasL, HVEM, Galectin-9, ILT3, and ILT4. TGFβ polypeptides may produce either an activating/stimulating effect or a suppressing/inhibitory effect, depending on the context. In some cases, the at least one immunomodulatory polypeptide is a reduced affinity variant, as described elsewhere herein. In some cases, the first or the second polypeptide comprises an Ig Fc polypeptide.

[0156] In some cases, a multiple disulfide-linked TMMP of the present disclosure comprises an HLA-B Class I heavy chain polypeptide. In some cases, the HLA-B heavy chain polypeptide present in a multiple disulfide-linked TMMP of the present disclosure (e.g., a double disulfide-linked TMMP) comprises an amino acid sequence having at least 95%, at least 98%, or at least 99%, amino acid sequence identity to the HLA-B*0702, HLA-B*0801, HLA-B*1502, HLA-B*3802, HLA-B*4001, HLA-B*4601, or HLA-B*5301 amino acid sequence depicted in FIG. 8A, where the HLA-B heavy chain polypeptide comprises Y84C and A236C substitutions.

### HLA-B*0702 (Y84C; A236C)

[0157] In some cases, the HLA-B heavy chain polypeptide present in a multiple disulfide-linked TMMP of the present disclosure (e.g., a double disulfide-linked TMMP) comprises an amino acid sequence having at least 95%, at least 98%, at least 99%, or 100%, amino acid sequence identity to the following HLA-B*0702 (Y84C; A236C) amino acid sequence:

(SEQ ID NO: 350)
GSHSMRYFYTSVSRPGRGEPRFISVGYVDDTQFVRFDSDAASPREEPRAPW
IEQEGPEYWDRNTQIYKAQAQTDRESLRNLRGCYNQSEAGSHTLQSMYGCD
VGPDGRLLRGHDQYAYDGKDYIALNEDLRSWTAADTAAQITQRKWEAAREA
EQRRAYLEGECVEWLRRYLENGKDKLERADPPKTHVTHHPISDHEATLRCW
ALGFYPAEITLTWQRDGEDQTQDTELVETRPCGDRTFQKWAAVVVPSGEEQ
RYTCHVQHEGLPKPLTLRWE,

where amino acid 84 is a Cys and amino acid 236 is a Cys.

### HLA-B*0801 (Y84C; A236C)

[0158] In some cases, the HLA-B heavy chain polypeptide present in a multiple disulfide-linked TMMP of the present disclosure (e.g., a double disulfide-linked TMMP) comprises an amino acid sequence having at least 95%, at least 98%, at least 99%, or 100%, amino acid sequence identity to the following HLA-B*0801 (Y84C; A236C) amino acid sequence:

(SEQ ID NO: 351)
GSHSMRYFDTAMSRPGRGEPRFISVGYVDDTQFVRFDSDAASPREEPRAPW
IEQEGPEYWDRNTQIFKTNTQTDRESLRNLRGCYNQSEAGSHTLQSMYGCD
VGPDGRLLRGHNQYAYDGKDYIALNEDLRSWTAADTAAQITQRKWEAARVA
EQDRAYLEGTCVEWLRRYLENGKDTLERADPPKTHVTHHPISDHEATLRCW
ALGFYPAEITLTWQRDGEDQTQDTELVETRPCGDRTFQKWAAVVVPSGEEQ
RYTCHVQHEGLPKPLTLRWE,

where amino acid 84 is a Cys and amino acid 236 is a Cys.

### HLA-B*1502 (Y84C; A236C)

[0159] In some cases, the HLA-B heavy chain polypeptide present in a multiple disulfide-linked TMMP of the present disclosure (e.g., a double disulfide-linked TMMP) comprises an amino acid sequence having at least 95%, at least 98%, at least 99%, or 100%, amino acid sequence identity to the following HLA-B*1502 (Y84C; A236C) amino acid sequence:

(SEQ ID NO: 352)
GSHSMRYFYTAMSRPGRGEPRFIAVGYVDDTQFVRFDSDAASPRMAPRAPW
IEQEGPEYWDRNTQISKTNTQTYRESLRNLRGCYNQSEAGSHIIQRMYGCD
VGPDGRLLRGYDQSAYDGKDYIALNEDLSSWTAADTAAQITQRKWEAAREA
EQLRAYLEGLCVEWLRRYLENGKETLQRADPPKTHVTHHPISDHEATLRCW
ALGFYPAEITLTWQRDGEDQTQDTELVETRPCGDRTFQKWAAVVVPSGEEQ
RYTCHVQHEGLPKPLTLRWE,

where amino acid 84 is a Cys and amino acid 236 is a Cys.

### HLA-B*3802 (Y84C; A236C)

[0160] In some cases, the HLA-B heavy chain polypeptide present in a multiple disulfide-linked TMMP of the present disclosure (e.g., a double disulfide-linked TMMP) comprises an amino acid sequence having at least 95%, at least 98%, at least 99%, or 100%, amino acid sequence identity to the following HLA-B*3802 (Y84C; A236C) amino acid sequence:

(SEQ ID NO: 353)
GSHSMRYFYTSVSRPGRGEPRFISVGYVDDTQFVRFDSDAASPREEPRAPW
IEQEGPEYWDRNTQICKTNTQTYRENLRTALRCYNQSEAGSHTLQRMYGCD
VGPDGRLLRGHNQFAYDGKDYIALNEDLSSWTAADTAAQITQRKWEAARVA
EQLRTYLEGTCVEWLRRYLENGKETLQRADPPKTHVTHHPISDHEATLRCW
ALGFYPAEITLTWQRDGEDQTQDTELVETRPCGDRTFQKWAAVVVPSGEEQ
RYTCHVQHEGLPKPLTLRWE,

where amino acid 84 is a Cys and amino acid 236 is a Cys.

### HLA-B*4001 (Y84C; A2346C)

[0161] In some cases, the HLA-B heavy chain polypeptide present in a multiple disulfide-linked TMMP of the present disclosure (e.g., a double disulfide-linked TMMP) comprises an amino acid sequence having at least 95%, at least 98%, at least 99%, or 100%, amino acid sequence identity to the following HLA-B*4001 (Y84C; A236C) amino acid sequence:

(SEQ ID NO: 354)
GSHSMRYFHTAMSRPGRGEPRFITVGYVDDTLFVRFDSDATSPRKEPRAPW
IEQEGPEYWDRETQISKTNTQTYRESLRNLRGCYNQSEAGSHTLQRMYGCD
VGPDGRLLRGHNQYAYDGKDYIALNEDLRSWTAADTAAQISQRKLEAARVA
EQLRAYLEGECVEWLRRYLENGKDKLERADPPKTHVTHHPISDHEATLRCW
ALGFYPAEITLTWQRDGEDQTQDTELVETRPCGDRTFQKWAAVVVPSGEEQ
RYTCHVQHEGLPKPLTLRWE

where amino acid 84 is a Cys and amino acid 236 is a Cys.

### HLA-B*4601 (Y84C; A236C)

[0162] In some cases, the HLA-B heavy chain polypeptide present in a multiple disulfide-linked TMMP of the present disclosure (e.g., a double disulfide-linked TMMP) comprises an amino acid sequence having at least 95%, at least 98%, at least 99%, or 100%, amino acid sequence identity to the following HLA-B*4601 (Y84C; A236C) amino acid sequence:

(SEQ ID NO: 355)
GSHSMRYFYTAMSRPGRGEPRFIAVGYVDDTQFVRFDSDAASPRMAPRAPW
IEQEGPEYWDRETQKYKRQAQTDRVSLRNLRGCYNQSEAGSHTLQRMYGCD
VGPDGRLLRGHDQSAYDGKDYIALNEDLSSWTAADTAAQITQRKWEAAREA
EQWRAYLEGLCVEWLRRYLENGKETLQRADPPKTHVTHHPISDHEATLRCW
ALGFYPAEITLTWQRDGEDQTQDTELVETRPCGDRTFQKWAAVVVPSGEEQ
RYTCHVQHEGLPKPLTLRWE

where amino acid 84 is a Cys and amino acid 236 is a Cys.

### HLA-B*5301 (Y84C; A236C)

[0163] In some cases, the HLA-B heavy chain polypeptide present in a multiple disulfide-linked TMMP of the present disclosure (e.g., a double disulfide-linked TMMP) comprises an amino acid sequence having at least 95%, at least 98%, at least 99%, or 100%, amino acid sequence identity to the following HLA-B*5301 (Y84C; A236C) amino acid sequence:

(SEQ ID NO: 356)
GSHSMRYFYTAMSRPGRGEPRFIAVGYVDDTQFVRFDSDAASPRTEPRAPW
IEQEGPEYWDRNTQIFKTNTQTYRENLRIALRCYNQSEAGSHIIQRMYGCD
LGPDGRLLRGHDQSAYDGKDYIALNEDLSSWTAADTAAQITQRKWEAARVA
EQLRAYLEGLCVEWLRRYLENGKETLQRADPPKTHVTHHPVSDHEATLRCW
ALGFYPAEITLTWQRDGEDQTQDTELVETRPCGDRTFQKWAAVVVPSGEEQ
RYTCHVQHEGLPKPLTLRWE

where amino acid 84 is a Cys and amino acid 236 is a Cys.

### HLA-C

[0164] In some cases, a multiple disulfide-linked TMMP of the present disclosure (e.g., a double disulfide-linked TMMP) comprises: a) a first polypeptide comprising: i) a peptide (e.g., a peptide of from 4 amino acids to about 25 amino acids that is bound by a TCR when the peptide is complexed with MHC polypeptides); and ii) a first MHC polypeptide, where the first polypeptide comprises a peptide linker between the peptide and the first MHC polypeptide, where the peptide linker comprises a Cys residue, and where the first MHC polypeptide is a β2M polypeptide that comprises an amino acid substitution that introduces a Cys residue; and b) a second polypeptide comprising an HLA-C MHC Class I heavy chain comprising an amino acid sequence having at least 60%, at least 70%, at least 80%, at least 90%, at least 95%, at least 98%, at least 99%, or 100%, amino acid sequence identity to the following amino acid sequence:

(SEQ ID NO: 357)
CSHSMRYFDTAVSRPGRGEPRFISVGYVDDTQFVRFDSDAASPRGEPRAPW
VEQEGPEYWDRETQNYKRQAQADRVSLRNLRGCYNQSEDGSHTLQRMYGCD
LGPDGRLLRGYDQSAYDGKDYIALNEDLRSWTAADTAAQITQRKLEAARAA
EQLRAYLEGTCVEWLRRYLENGKETLQRAEPPKTHVTHHPLSDHEATLRCW
ALGFYPAEITLTWQRDGEDQTQDTELVETRPCGDGTFQKWAAVVVPSGQEQ
RYTCHMQHEGLQEPLTLSWEP,

where amino acid 84 is a Cys and amino acid 236 is a Cys; and c) at least one immunomodulatory polypeptide, where the first and/or the second polypeptide comprises the at least one immunomodulatory polypeptide. In some cases, the peptide linker comprises the amino acid sequence GCGGS (SEQ ID NO:318). In some cases, the peptide linker comprises the amino acid sequence GCGGS(GGGGS)n (SEQ ID NO:342), where n is an integer from 1 to 10. In some cases, the β2M polypeptide comprises an R12C substitution. For example, the β2M polypeptide can comprises an amino acid sequence having at least 90%, at least 95%, at least 98%, at least 99%, or 100%, amino acid sequence identity to the following amino acid sequence:

(SEQ ID NO: 314)
IQRTPKIQVYSCHPAENGKSNFLNCYVSGFHPSDIEVDLLKNGERIEKVEH
SDLSFSKDWSFYLLYYTEFTPTEKDEYACRVNHVTLSQPKIVKWDRDM,

where amino acid 12 is a Cys. The at least one immunomodulatory polypeptide can be a polypeptide that exerts an activating/stimulating effect on the target T cell or a suppressing/inhibitory effect on the target T cell. For example, the at least one immunomodulatory polypeptide can be a cytokine (e.g., an IL2 polypeptide, an IL7 polypeptide, an IL12 polypeptide, an IL15 polypeptide, an IL17 polypeptide, an IL21 polypeptide, an IL27 polypeptide, an IL-23 polypeptide, a TGFβ polypeptide, and the like; and including all family members, e.g., IL17A, IL-17B, IL-17C, IL-17D, IL-17E, IL-17F, IL-17E), a 4-1BBL polypeptide, an ICOS-L polypeptide, an OX-40L polypeptide, a CD80 polypeptide, a CD86 polypeptide, (CD80 and CD86 are also known as B7-1 and B7-2, respectively), a CD40 polypeptide, a CD70 polypeptide, a JAG1 (CD339) polypeptide, an ICAM (CD540 polypeptide, a PD-L1 polypeptide, a FasL polypeptide, a PD-L2 polypeptide, a PD-1H (VISTA) polypeptide, an ICOS-L (CD275) polypeptide, a GITRL polypeptide, an HVEM polypeptide, a CXCL10 polypeptide, a CXCL9 polypeptide, a CXCL11 polypeptide, a CXCL13 polypeptide, and a CX3CL1 polypeptide, a Galectin-9 polypeptide, a CD83 polypeptide, a CD30L polypeptide, a HLA-G polypeptide, a MICA polypeptide, a MICB polypeptide, a HVEM (CD270) polypeptide, a lymphotoxin beta receptor polypeptide, a 3/TR6 polypeptide, an ILT3 polypeptide, an ILT4 polypeptide, a CXCL10 polypeptide, a CXCL9 polypeptide, a CXCL11 polypeptide, a CXCL13 polypeptide, or a CX3CL1 polypeptide. These immunomodulatory polypeptides may be the wild type polypeptide or a variant of a wild type polypeptide. In some cases, the immunomodulatory polypeptide is an activating (“stimulatory”) immunomodulatory polypeptide; e.g., the immunomodulatory polypeptide may produce an activating/stimulating effect on a T cell. Examples of activating immunomodulatory polypeptides include, e.g., CD80, CD86, 4-1BBL, OX40L, CD70, ICOS-L, CD40, ICAM (CD54), IL2, IL7, IL12, IL15, IL17, IL21, IL27, IL23, GITRL, TGFβ, and lymphotoxin beta receptor. In some cases, the immunomodulatory polypeptide is an inhibitory (“suppressing”) immunomodulatory polypeptide; e.g., the immunomodulatory polypeptide s may produce a suppressing/inhibitory effect on a T cell. Examples of inhibitory immunomodulatory polypeptides include, e.g., PD-1H, PD-L1, PD-L2, TGFβ, FasL, HVEM, Galectin-9, ILT3, and ILT4. TGFβ polypeptides may produce either an activating/stimulating effect or a suppressing/inhibitory effect, depending on the context. In some cases, the at least one immunomodulatory polypeptide is a reduced affinity variant, as described elsewhere herein. In some cases, the first or the second polypeptide comprises an Ig Fc polypeptide.

[0165] In some cases, a multiple disulfide-linked TMMP of the present disclosure (e.g., a double disulfide-linked TMMP) comprises an HLA-C Class I heavy chain polypeptide. In some cases, the HLA-C heavy chain polypeptide present in a multiple disulfide-linked TMMP of the present disclosure (e.g., a double disulfide-linked TMMP) comprises an amino acid sequence having at least 95%, at least 98%, or at least 99%, amino acid sequence identity to the HLA-C*0102, HLA-C*0303, HLA-C*0304, HLA-C*0401, HLA-C*0602, HLA-C*0701, HLA-C*0702, HLA-C*0801, or HLA-C*1502 amino acid sequence depicted in FIG. 9A, where the HLA-C heavy chain polypeptide comprises Y84C and A236C substitutions.

### HLA-C*01:02 (Y84C; A236C)

[0166] In some cases, the HLA-C heavy chain polypeptide present in a multiple disulfide-linked TMMP of the present disclosure (e.g., a double disulfide-linked TMMP) comprises an amino acid sequence having at least 95%, at least 98%, at least 99%, or 100%, amino acid sequence identity to the following HLA-C*01:02 (Y84C; A236C) amino acid sequence:

(SEQ ID NO: 358)
CSHSMKYFFTSVSRPGRGEPRFISVGYVDDTQFVRFDSDAASPRGEPRAPW
VEQEGPEYWDRETQKYKRQAQTDRVSLRNLRGCYNQSEAGSHTLQWMCGCD
LGPDGRLLRGYDQYAYDGKDYIALNEDLRSWTAADTAAQITQRKWEAAREA
EQRRAYLEGTCVEWLRRYLENGKETLQRAEHPKTHVTHHPVSDHEATLRCW
ALGFYPAEITLTWQWDGEDQTQDTELVETRPCGDGTFQKWAAVMVPSGEEQ
RYTCHVQHEGLPEPLTLRWEP,

where amino acid 84 is a Cys and amino acid 236 is a Cys.

### HLA-C*0303 (Y84C; A236C)

[0167] In some cases, the HLA-C heavy chain polypeptide present in a multiple disulfide-linked TMMP of the present disclosure (e.g., a double disulfide-linked TMMP) comprises an amino acid sequence having at least 95%, at least 98%, at least 99%, or 100%, amino acid sequence identity to the following HLA-C*03:03 (Y84C; A236C) amino acid sequence:

(SEQ ID NO: 359)
GSHSMRYFYTAVSRPGRGEPHFIAVGYVDDTQFVRFDSDAASPRGEPRAPW
VEQEGPEYWDRETQKYKRQAQTDRVSLRNLRGCYNQSEARSHIIQRMYGCD
VGPDGRLLRGYDQYAYDGKDYIALNEDLRSWTAADTAAQITQRKWEAAREA
EQLRAYLEGLCVEWLRRYLKNGKETLQRAEHPKTHVTHHPVSDHEATLRCW
ALGFYPAEITLTWQWDGEDQTQDTELVETRPCGDGTFQKWAAVVVPSGEEQ
RYTCHVQHEGLPEPLTLRWEP,

where amino acid 84 is a Cys and amino acid 236 is a Cys.

### HLA-C*0304 (Y84C; A236C)

[0168] In some cases, the HLA-C heavy chain polypeptide present in a multiple disulfide-linked TMMP of the present disclosure (e.g., a double disulfide-linked TMMP) comprises an amino acid sequence having at least 95%, at least 98%, at least 99%, or 100%, amino acid sequence identity to the following HLA-C*03:04 (Y84C; A236C) amino acid sequence:

(SEQ ID NO: 360)
GSHSMRYFYTAVSRPGRGEPHFIAVGYVDDTQFVRFDSDAASPRGEPRAPW
VEQEGPEYWDRETQKYKRQAQTDRVSLRNLRGCYNQSEAGSHIIQRMYGCD
VGPDGRLLRGYDQYAYDGKDYIALNEDLRSWTAADTAAQITQRKWEAAREA
EQLRAYLEGLCVEWLRRYLKNGKETLQRAEHPKTHVTHHPVSDHEATLRCW
ALGFYPAEITLTWQWDGEDQTQDTELVETRPCGDGTFQKWAAVVVPSGEEQ
RYTCHVQHEGLPEPLTLRWEP,

where amino acid 84 is a Cys and amino acid 236 is a Cys.

### HLA-C*0401 (Y84C; A236C)

[0169] In some cases, the HLA-C heavy chain polypeptide present in a multiple disulfide-linked TMMP of the present disclosure (e.g., a double disulfide-linked TMMP) comprises an amino acid sequence having at least 95%, at least 98%, at least 99%, or 100%, amino acid sequence identity to the following HLA-C*04:01 (Y84C; A236C) amino acid sequence:

(SEQ ID NO: 361)
GSHSMRYFSTSVSWPGRGEPRFIAVGYVDDTQFVRFDSDAASPRGEPREPW
VEQEGPEYWDRETQKYKRQAQADRVNLRKLRGCYNQSEDGSHTLQRMFGCD
LGPDGRLLRGYNQFAYDGKDYIALNEDLRSWTAADTAAQITQRKWEAAREA
EQRRAYLEGTCVEWLRRYLENGKETLQRAEHPKTHVTHHPVSDHEATLRCW
ALGFYPAEITLTWQWDGEDQTQDTELVETRPCGDGTFQKWAAVVVPSGEEQ
RYTCHVQHEGLPEPLTLRWKP,

where amino acid 84 is a Cys and amino acid 236 is a Cys.

### HLA-C*0602 (Y84C; A236C)

[0170] In some cases, the HLA-C heavy chain polypeptide present in a multiple disulfide-linked TMMP of the present disclosure (e.g., a double disulfide-linked TMMP) comprises an amino acid sequence having at least 95%, at least 98%, at least 99%, or 100%, amino acid sequence identity to the following HLA-C*06:02 (Y84C; A236C) amino acid sequence:

(SEQ ID NO: 362)
CSHSMRYFDTAVSRPGRGEPRFISVGYVDDTQFVRFDSDAASPRGEPRAPW
VEQEGPEYWDRETQKYKRQAQADRVNLRKLRGCYNQSEDGSHTLQWMYGCD
LGPDGRLLRGYDQSAYDGKDYIALNEDLRSWTAADTAAQITQRKWEAAREA
EQWRAYLEGTCVEWLRRYLENGKETLQRAEHPKTHVTHHPVSDHEATLRCW
ALGFYPAEITLTWQRDGEDQTQDTELVETRPCGDGTFQKWAAVVVPSGEEQ
RYTCHVQHEGLPEPLTLRWEP,

where amino acid 84 is a Cys and amino acid 236 is a Cys.

### HLA-C*0701 (Y84C; A236C)

[0171] In some cases, the HLA-C heavy chain polypeptide present in a multiple disulfide-linked TMMP of the present disclosure (e.g., a double disulfide-linked TMMP) comprises an amino acid sequence having at least 95%, at least 98%, at least 99%, or 100%, amino acid sequence identity to the following HLA-C*07:01 (Y84C; A236C) amino acid sequence:

(SEQ ID NO: 357)
CSHSMRYFDTAVSRPGRGEPRFISVGYVDDTQFVRFDSDAASPRGEPRAPW
VEQEGPEYWDRETQNYKRQAQADRVSLRNLRGCYNQSEDGSHTLQRMYGCD
LGPDGRLLRGYDQSAYDGKDYIALNEDLRSWTAADTAAQITQRKLEAARAA
EQLRAYLEGTCVEWLRRYLENGKETLQRAEPPKTHVTHHPLSDHEATLRCW
ALGFYPAEITLTWQRDGEDQTQDTELVETRPCGDGTFQKWAAVVVPSGQEQ
RYTCHMQHEGLQEPLTLSWEP,

where amino acid 84 is a Cys and amino acid 236 is a Cys.

### HLA-C*0702 (Y84C; A236C)

[0172] In some cases, the HLA-C heavy chain polypeptide present in a multiple disulfide-linked TMMP of the present disclosure (e.g., a double disulfide-linked TMMP) comprises an amino acid sequence having at least 95%, at least 98%, at least 99%, or 100%, amino acid sequence identity to the following HLA-C*07:02 (Y84C; A236C) amino acid sequence:

(SEQ ID NO: 404)
CSHSMRYFDTAVSRPGRGEPRFISVGYVDDTQFVRFDSDAASPRGEPRAPW
VEQEGPEYWDRETQKYKRQAQADRVSLRNLRGCYNQSEDGSHTLQRMSGCD
LGPDGRLLRGYDQSAYDGKDYIALNEDLRSWTAADTAAQITQRKLEAARAA
EQLRAYLEGTCVEWLRRYLENGKETLQRAEPPKTHVTHHPLSDHEATLRCW
ALGFYPAEITLTWQRDGEDQTQDTELVETRPCGDGTFQKWAAVVVPSGQEQ
RYTCHMQHEGLQEPLTLSWEP,

where amino acid 84 is a Cys and amino acid 236 is a Cys.

### HLA-C*0801 (Y84C; A236C)

[0173] In some cases, the HLA-C heavy chain polypeptide present in a multiple disulfide-linked TMMP of the present disclosure (e.g., a double disulfide-linked TMMP) comprises an amino acid sequence having at least 95%, at least 98%, at least 99%, or 100%, amino acid sequence identity to the following HLA-C*08:01 (Y84C; A236C) amino acid sequence:

(SEQ ID NO: 363)
CSHSMRYFYTAVSRPGRGEPRFIAVGYVDDTQFVQFDSDAASPRGEPRAPW
VEQEGPEYWDRETQKYKRQAQTDRVSLRNLRGCYNQSEAGSHTLQRMYGCD
LGPDGRLLRGYNQFAYDGKDYIALNEDLRSWTAADTAAQITQRKWEAARTA
EQLRAYLEGTCVEWLRRYLENGKKTLQRAEHPKTHVTHHPVSDHEATLRCW
ALGFYPAEITLTWQRDGEDQTQDTELVETRPCGDGTFQKWAAVVVPSGEEQ
RYTCHVQHEGLPEPLTLRWGP,

where amino acid 84 is a Cys and amino acid 236 is a Cys.

### HLA-C*1502 (Y84C; A236C)

[0174] In some cases, the HLA-C heavy chain polypeptide present in a multiple disulfide-linked TMMP of the present disclosure (e.g., a double disulfide-linked TMMP) comprises an amino acid sequence having at least 95%, at least 98%, at least 99%, or 100%, amino acid sequence identity to the following HLA-C*15:02 (Y84C; A236C) amino acid sequence:

(SEQ ID NO: 364)
CSHSMRYFYTAVSRPGRGEPHFIAVGYVDDTQFVRFDSDAASPRGEPRAP
WVEQEGPEYWDRETQNYKRQAQTDRVNLRKLRGCYNQSEAGSHIIQRMYG
CDLGPDGRLLRGHDQLAYDGKDYIALNEDLRSWTAADTAAQITQRKWEAA
REAEQLRAYLEGTCVEWLRRYLENGKETLQRAEHPKTHVTHHPVSDHEAT
LRCWALGFYPAEITLTWQRDGEDQTQDTELVETRPCGDGTFQKWAAVVVP
SGEEQRYTCHVQHEGLPEPLTLRWEP,

where amino acid 84 is a Cys and amino acid 236 is a Cys.

### Scaffold Polypeptides

[0175] A TMMP can comprise an Fc polypeptide, or can comprise another suitable scaffold polypeptide.

[0176] Suitable scaffold polypeptides include antibody-based scaffold polypeptides and non-antibody-based scaffolds. Non-antibody-based scaffolds include, e.g., albumin, an XTEN (extended recombinant) polypeptide, transferrin, an Fc receptor polypeptide, an elastin-like polypeptide (see, e.g., Hassouneh et al. (2012) Methods Enzymol. 502:215; e.g., a polypeptide comprising a pentapeptide repeat unit of (Val-Pro-Gly-X-Gly; SEQ ID NO:59), where X is any amino acid other than proline), an albumin-binding polypeptide, a silk-like polypeptide (see, e.g., Valluzzi et al. (2002) Philos Trans R Soc Lond B Biol Sci. 357:165), a silk-elastin-like polypeptide (SELP; see, e.g., Megeed et al. (2002) Adv Drug Deliv Rev. 54:1075), and the like. Suitable XTEN polypeptides include, e.g., those disclosed in WO 2009/023270, WO 2010/091122, WO 2007/103515, US 2010/0189682, and US 2009/0092582; see also Schellenberger et al. (2009) Nat Biotechnol. 27:1186). Suitable albumin polypeptides include, e.g., human serum albumin.

[0177] Suitable scaffold polypeptides will in some cases be a half-life extending polypeptides. Thus, in some cases, a suitable scaffold polypeptide increases the in vivo half-life (e.g., the serum half-life) of the TMMP, compared to a control TMMP lacking the scaffold polypeptide. For example, in some cases, a scaffold polypeptide increases the in vivo half-life (e.g., the serum half-life) of the TMMP, compared to a control TMMP lacking the scaffold polypeptide, by at least about 10%, at least about 15%, at least about 20%, at least about 25%, at least about 50%, at least about 2-fold, at least about 2.5-fold, at least about 5-fold, at least about 10-fold, at least about 25-fold, at least about 50-fold, at least about 100-fold, or more than 100-fold. As an example, in some cases, an Fc polypeptide increases the in vivo half-life (e.g., the serum half-life) of the TMMP, compared to a control TMMP lacking the Fc polypeptide, by at least about 10%, at least about 15%, at least about 20%, at least about 25%, at least about 50%, at least about 2-fold, at least about 2.5-fold, at least about 5-fold, at least about 10-fold, at least about 25-fold, at least about 50-fold, at least about 100-fold, or more than 100-fold.

### Fc Polypeptides

[0178] In some cases, the first and/or the second polypeptide chain of a TMMP of the present disclosure comprises an Fc polypeptide. The Fc polypeptide of a TMMP of the present disclosure can be a human IgG1 Fc, a human IgG2 Fc, a human IgG3 Fc, a human IgG4 Fc, etc. In some cases, the Fc polypeptide comprises an amino acid sequence having at least about 70%, at least about 75%, at least about 80%, at least about 85%, at least about 90%, at least about 95%, at least about 98%, at least about 99%, or 100%, amino acid sequence identity to an amino acid sequence of an Fc region depicted in FIGS. 3A-3G. In some cases, the Fc region comprises an amino acid sequence having at least about 70%, at least about 75%, at least about 80%, at least about 85%, at least about 90%, at least about 95%, at least about 98%, at least about 99%, or 100%, amino acid sequence identity to the human IgG1 Fc polypeptide depicted in FIG. 3A. In some cases, the Fc region comprises an amino acid sequence having at least about 70%, at least about 75%, at least about 80%, at least about 85%, at least about 90%, at least about 95%, at least about 98%, at least about 99%, or 100%, amino acid sequence identity to the human IgG1 Fc polypeptide depicted in FIG. 3A; and comprises a substitution of N77; e.g., the Fc polypeptide comprises an N77A substitution. In some cases, the Fc polypeptide comprises an amino acid sequence having at least about 70%, at least about 75%, at least about 80%, at least about 85%, at least about 90%, at least about 95%, at least about 98%, at least about 99%, or 100%, amino acid sequence identity to the human IgG2 Fc polypeptide depicted in FIG. 3A; e.g., the Fc polypeptide comprises an amino acid sequence having at least about 70%, at least about 75%, at least about 80%, at least about 85%, at least about 90%, at least about 95%, at least about 98%, at least about 99%, or 100%, amino acid sequence identity to amino acids 99-325 of the human IgG2 Fc polypeptide depicted in FIG. 3A. In some cases, the Fc polypeptide comprises an amino acid sequence having at least about 70%, at least about 75%, at least about 80%, at least about 85%, at least about 90%, at least about 95%, at least about 98%, at least about 99%, or 100%, amino acid sequence identity to the human IgG3 Fc polypeptide depicted in FIG. 3A; e.g., the Fc polypeptide comprises an amino acid sequence having at least about 70%, at least about 75%, at least about 80%, at least about 85%, at least about 90%, at least about 95%, at least about 98%, at least about 99%, or 100%, amino acid sequence identity to amino acids 19-246 of the human IgG3 Fc polypeptide depicted in FIG. 3A. In some cases, the Fc polypeptide comprises an amino acid sequence having at least about 70%, at least about 75%, at least about 80%, at least about 85%, at least about 90%, at least about 95%, at least about 98%, at least about 99%, or 100%, amino acid sequence identity to the human IgM Fc polypeptide depicted in FIG. 3B; e.g., the Fc polypeptide comprises an amino acid sequence having at least about 70%, at least about 75%, at least about 80%, at least about 85%, at least about 90%, at least about 95%, at least about 98%, at least about 99%, or 100%, amino acid sequence identity to amino acids 1-276 to the human IgM Fc polypeptide depicted in FIG. 3B. In some cases, the Fc polypeptide comprises an amino acid sequence having at least about 70%, at least about 75%, at least about 80%, at least about 85%, at least about 90%, at least about 95%, at least about 98%, at least about 99%, or 100%, amino acid sequence identity to the human IgA Fc polypeptide depicted in FIG. 3C; e.g., the Fc polypeptide comprises an amino acid sequence having at least about 70%, at least about 75%, at least about 80%, at least about 85%, at least about 90%, at least about 95%, at least about 98%, at least about 99%, or 100%, amino acid sequence identity to amino acids 1-234 to the human IgA Fc polypeptide depicted in FIG. 3C.

[0179] In some cases, the Fc polypeptide comprises an amino acid sequence having at least about 70%, at least about 75%, at least about 80%, at least about 85%, at least about 90%, at least about 95%, at least about 98%, at least about 99%, or 100%, amino acid sequence identity to the human IgG4 Fc polypeptide depicted in FIG. 3C. In some cases, the Fc polypeptide comprises an amino acid sequence having at least about 70%, at least about 75%, at least about 80%, at least about 85%, at least about 90%, at least about 95%, at least about 98%, at least about 99%, or 100%, amino acid sequence identity to amino acids 100 to 327 of the human IgG4 Fc polypeptide depicted in FIG. 3C.

[0180] In some cases, the IgG4 Fc polypeptide comprises the following amino acid sequence:

(SEQ ID NO: 365)
PPCPSCPAPEFLGGPSVFLFPPKPKDTLMISRTPEVTCVVVDVSQEDPEV
QFNWYVDGVEVHNAKTKPREEQFNSTYRVVSVLTVLHQDWLNGKEYKCKV
SNKGLPSSIEKTISKAKGQPREPQVYTLPPSQEEMTKNQVSLTCLVKGFY
PSDIAVEWESNGQPENNYKTTPPVLDSDGSFFLYSRLTVDKSRWQEGNVF
SCSVMHEALHNHYTQKSLSLSPG.

[0181] In some cases, the Fc polypeptide present in a TMMP comprises the amino acid sequence depicted in FIG. 3A (human IgG1 Fc). In some cases, the Fc polypeptide present in a TMMP comprises the amino acid sequence depicted in FIG. 3A (human IgG1 Fc), except for a substitution of N297 (N77 of the amino acid sequence depicted in FIG. 3A) with an amino acid other than asparagine. In some cases, the Fc polypeptide present in a TMMP comprises the amino acid sequence depicted in FIG. 3C (human IgG1 Fc comprising an N297A substitution, which is N77 of the amino acid sequence depicted in FIG. 3A). In some cases, the Fc polypeptide present in a TMMP comprises the amino acid sequence depicted in FIG. 3A (human IgG1 Fc), except for a substitution of L234 (L14 of the amino acid sequence depicted in FIG. 3A) with an amino acid other than leucine. In some cases, the Fc polypeptide present in a TMMP comprises the amino acid sequence depicted in FIG. 3A (human IgG1 Fc), except for a substitution of L235 (L15 of the amino acid sequence depicted in FIG. 3A) with an amino acid other than leucine.

[0182] In some cases, the Fc polypeptide present in a TMMP comprises the amino acid sequence depicted in FIG. 3E. In some cases, the Fc polypeptide present in a TMMP comprises the amino acid sequence depicted in FIG. 3F. In some cases, the Fc polypeptide present in a TMMP comprises the amino acid sequence depicted in FIG. 5G (human IgG1 Fc comprising an L234A substitution and an L235A substitution, corresponding to positions 14 and 15 of the amino acid sequence depicted in FIG. 3G). In some cases, the Fc polypeptide present in a TMMP comprises the amino acid sequence depicted in FIG. 3A (human IgG1 Fc), except for a substitution of P331 (P111 of the amino acid sequence depicted in FIG. 3A) with an amino acid other than proline; in some cases, the substitution is a P331S substitution. In some cases, the Fc polypeptide present in a TMMP comprises the amino acid sequence depicted in FIG. 3A (human IgG1 Fc), except for substitutions at L234 and L235 (L14 and L15 of the amino acid sequence depicted in FIG. 3A) with amino acids other than leucine. In some cases, the Fc polypeptide present in a TMMP comprises the amino acid sequence depicted in FIG. 3A (human IgG1 Fc), except for substitutions at L234 and L235 (L14 and L15 of the amino acid sequence depicted in FIG. 3A) with amino acids other than leucine, and a substitution of P331 (P111 of the amino acid sequence depicted in FIG. 3A) with an amino acid other than proline. In some cases, the Fc polypeptide present in a TMMP comprises the amino acid sequence depicted in FIG. 3E (human IgG1 Fc comprising L234F, L235E, and P331S substitutions (corresponding to amino acid positions 14, 15, and 111 of the amino acid sequence depicted in FIG. 3E). In some cases, the Fc polypeptide present in a TMMP is an IgG1 Fc polypeptide that comprises L234A and L235A substitutions (substitutions of L14 and L15 of the amino acid sequence depicted in FIG. 3A with Ala), as depicted in FIG. 3G.

### Linkers

[0183] A TMMP of the present disclosure can include one or more linkers, where the one or more linkers are between one or more of: i) an MHC Class I polypeptide and an Ig Fc polypeptide, where such a linker is referred to herein as “L1”; ii) an immunomodulatory polypeptide and an MHC Class I polypeptide, where such a linker is referred to herein as “L2”; iii) a first immunomodulatory polypeptide and a second immunomodulatory polypeptide, where such a linker is referred to herein as “L3”; iv) a peptide antigen (“epitope”) and an MHC Class I polypeptide; v) an MHC Class I polypeptide and a dimerization polypeptide (e.g., a first or a second member of a dimerizing pair); and vi) a dimerization polypeptide (e.g., a first or a second member of a dimerizing pair) and an IgFc polypeptide.

[0184] Suitable linkers (also referred to as “spacers”) can be readily selected and can be of any of a number of suitable lengths, such as from 1 amino acid to 25 amino acids, from 3 amino acids to 20 amino acids, from 2 amino acids to 15 amino acids, from 3 amino acids to 12 amino acids, including 4 amino acids to 10 amino acids, 5 amino acids to 9 amino acids, 6 amino acids to 8 amino acids, or 7 amino acids to 8 amino acids. A suitable linker can be 1, 2, 3, 4, 5, 6, 7, 8, 9, 10, 11, 12, 13, 14, 15, 16, 17, 18, 19, 20, 21, 22, 23, 24, or 25 amino acids in length. In some cases, a linker has a length of from 25 amino acids to 50 amino acids, e.g., from 25 to 30, from 30 to 35, from 35 to 40, from 40 to 45, or from 45 to 50 amino acids in length.

[0185] Exemplary linkers include glycine polymers (G)ₙ, glycine-serine polymers (including, for example, (GS)ₙ, (GSGGS)ₙ (SEQ ID NO:366) and (GGGS)ₙ (SEQ ID NO:367), where n is an integer of at least one), glycine-alanine polymers, alanine-serine polymers, and other flexible linkers known in the art. Glycine and glycine-serine polymers can be used; both Gly and Ser are relatively unstructured, and therefore can serve as a neutral tether between components. Glycine polymers can be used; glycine accesses significantly more phi-psi space than even alanine, and is much less restricted than residues with longer side chains (see Scheraga, Rev. Computational Chem. 11173-142 (1992)). Exemplary linkers can comprise amino acid sequences including, but not limited to, GGSG (SEQ ID NO:368), GGSGG (SEQ ID NO:369), GSGSG (SEQ ID NO:370), GSGGG (SEQ ID NO:371), GGGSG (SEQ ID NO:372), GSSSG (SEQ ID NO:373), and the like. Exemplary linkers can include, e.g., Gly(Ser₄)n (SEQ ID NO:374), where n is 1, 2, 3, 4, 5, 6, 7, 8, 9, or 10. In some cases, a linker comprises the amino acid sequence (GSSSS)n (SEQ ID NO:375), where n is 4. In some cases, a linker comprises the amino acid sequence (GSSSS)n (SEQ ID NO:376), where n is 5. In some cases, a linker comprises the amino acid sequence (GGGGS)n (SEQ ID NO:377), where n is 1. In some cases, a linker comprises the amino acid sequence (GGGGS)n (SEQ ID NO:378), where n is 2. In some cases, a linker comprises the amino acid sequence (GGGGS)n (SEQ ID NO:379), where n is 3. In some cases, a linker comprises the amino acid sequence (GGGGS)n (SEQ ID NO:380), where n is 4. In some cases, a linker comprises the amino acid sequence (GGGGS)n (SEQ ID NO:381), where n is 5. In some cases, a linker comprises the amino acid sequence (GGGGS)n (SEQ ID NO:382), where n is 6. In some cases, a linker comprises the amino acid sequence (GGGGS)n (SEQ ID NO:383), where n is 7, In some cases, a linker comprises the amino acid sequence (GGGGS)n (SEQ ID NO:384), where n is 8, In some cases, a linker comprises the amino acid sequence (GGGGS)n (SEQ ID NO:385), where n is 9, In some cases, a linker comprises the amino acid sequence (GGGGS)n (SEQ ID NO:386), where n is 10. In some cases, a linker comprises the amino acid sequence AAAGG (SEQ ID NO:387).

[0186] In some cases, a linker polypeptide, present in a first polypeptide of a TMMP of the present disclosure, includes a cysteine residue that can form a disulfide bond with a cysteine residue present in a second polypeptide of a TMMP of the present disclosure. In some cases, for example, a suitable linker comprises the amino acid sequence GCGGSGGGGSGGGGS (SEQ ID NO:317). As another example, a suitable linker can comprise the amino acid sequence GCGGS(G4S)n (SEQ ID NO:315), where n is 1, 2, 3, 4, 5, 6, 7, 8, or 9. For example, in some cases, the linker comprises the amino acid sequence GCGGSGGGGSGGGGSGGGGS (SEQ ID NO:316). As another example, the linker comprises the amino acid sequence GCGGSGGGGSGGGGS (SEQ ID NO:317).

### Epitopes

[0187] A TMMP of the present disclosure comprises any of a variety of peptide epitopes. A TMMP comprises a peptide that, when in an MHC/peptide complex (e.g., an HLA/peptide complex), presents an epitope to a T cell. A peptide, present in a TMMP of the present disclosure, that, when in an MHC/peptide complex (e.g., an HLA/peptide complex), presents an epitope to a T cell, is referred to herein as a “peptide epitope” or, simply, an “epitope.”

[0188] An epitope present in a TMMP of the present disclosure can have a length of from about 4 amino acids to about 25 amino acids, e.g., the epitope can have a length of from 4 amino acids (aa) to 10 aa, from 10 aa to 15 aa, from 15 aa to 20 aa, or from 20 aa to 25 aa. For example, an epitope present in a TMMP of the present disclosure can have a length of 4 amino acids (aa), 5 aa, 6 aa, 7, aa, 8 aa, 9 aa, 10 aa, 11 aa, 12 aa, 13 aa, 14 aa, 15 aa, 16 aa, 17 aa, 18 aa, 19 aa, 20 aa, 21 aa, 22 aa, 23 aa, 24 aa, or 25 aa. In some cases, an epitope present in a TMMP of the present disclosure has a length of from 5 amino acids to 10 amino acids, e.g., 5 aa, 6 aa, 7 aa, 8 aa, 9 aa, or 10 aa.

[0189] An epitope present in a TMMP of the present disclosure is a peptide specifically bound by a T-cell, i.e., the epitope is specifically bound by an epitope-specific T cell. An epitope-specific T cell binds an epitope having a reference amino acid sequence, but does not substantially bind an epitope that differs from the reference amino acid sequence. For example, an epitope-specific T cell binds an epitope having a reference amino acid sequence, and binds an epitope that differs from the reference amino acid sequence, if at all, with an affinity that is less than 10⁻⁶ M, less than 10⁻⁵ M, or less than 10⁻⁴ M. An epitope-specific T cell can bind an epitope for which it is specific with an affinity of at least 10⁻⁷ M, at least 10⁻⁸ M, at least 10⁻⁹ M, or at least 10⁻¹⁰ M.

[0190] Suitable epitopes include, but are not limited to, epitopes present in a cancer-associated antigen. Cancer-associated antigens are known in the art; see, e.g., Cheever et al. (2009) Clin. Cancer Res. 15:5323. Cancer-associated antigens include, but are not limited to, α-folate receptor; carbonic anhydrase IX (CAIX); CD19; CD20; CD22; CD30; CD33; CD44v7/8; carcinoembryonic antigen (CEA); epithelial glycoprotein-2 (EGP-2); epithelial glycoprotein-40 (EGP-40); folate binding protein (FBP); fetal acetylcholine receptor; ganglioside antigen GD2; Her2/neu; IL-13R-a2; kappa light chain; LeY; L1 cell adhesion molecule; melanoma-associated antigen (MAGE); MAGE-A1; mesothelin; MUC1; NKG2D ligands; oncofetal antigen (h5T4); prostate stem cell antigen (PSCA); prostate-specific membrane antigen (PSMA); tumor-associate glycoprotein-72 (TAG-72); vascular endothelial growth factor receptor-2 (VEGF-R2). See, e.g., Vigneron et al. (2013) Cancer Immunity 13:15; and Vigneron (2015) BioMed Res. Int'l Article ID 948501; and epidermal growth factor receptor (EGFR) vIII polypeptide (see, e.g., Wong et al. (1992) Proc. Natl. Acad. Sci. USA 89:2965; and Miao et al. (2014) PLoSOne 9:e94281).

[0191] In some cases, a suitable peptide epitope is a peptide fragment of from about 4 amino acids to about 20 amino acids (e.g., 4 amino acids (aa), 5 aa, 6 aa, 7 aa, 8 aa, 9 aa, 10 aa, 11 aa, 12 aa, 13 aa, 14 aa, 15 aa, 16 aa, 17 aa, 18 aa, 19 aa, or 20 aa) in length of a MUC1 polypeptide, an LMP2 polypeptide, an epidermal growth factor receptor (EGFR) vIII polypeptide, a HER-2/neu polypeptide, a melanoma antigen family A, 3 (MAGE A3) polypeptide, a p53 polypeptide, a mutant p53 polypeptide, an NY-ESO-1 polypeptide, a folate hydrolase (prostate-specific membrane antigen; PSMA) polypeptide, a carcinoembryonic antigen (CEA) polypeptide, a melanoma antigen recognized by T-cells (melanA/MART1) polypeptide, a Ras polypeptide, a gp100 polypeptide, a proteinase3 (PR1) polypeptide, a bcr-abl polypeptide, a tyrosinase polypeptide, a survivin polypeptide, a prostate specific antigen (PSA) polypeptide, an hTERT polypeptide, a sarcoma translocation breakpoints polypeptide, a synovial sarcoma X (SSX) breakpoint polypeptide, an EphA2 polypeptide, an acid phosphatase, prostate (PAP) polypeptide, a melanoma inhibitor of apoptosis (ML-IAP) polypeptide, an epithelial cell adhesion molecule (EpCAM) polypeptide, an ERG (TMPRSS2 ETS fusion) polypeptide, a NA17 polypeptide, a paired-box-3 (PAX3) polypeptide, an anaplastic lymphoma kinase (ALK) polypeptide, an androgen receptor polypeptide, a cyclin B1 polypeptide, an N-myc proto-oncogene (MYCN) polypeptide, a Ras homolog gene family member C (RhoC) polypeptide, a tyrosinase-related protein-2 (TRP-2) polypeptide, a mesothelin polypeptide, a prostate stem cell antigen (PSCA) polypeptide, a melanoma associated antigen-1 (MAGE A1) polypeptide, a cytochrome P450 1B1 (CYP1B1) polypeptide, a placenta-specific protein 1 (PLAC1) polypeptide, a BORIS polypeptide (also known as CCCTC-binding factor or CTCF), an ETV6-AML polypeptide, a breast cancer antigen NY-BR-1 polypeptide (also referred to as ankyrin repeat domain-containing protein 30A), a regulator of G-protein signaling (RGS5) polypeptide, a squamous cell carcinoma antigen recognized by T-cells (SART3) polypeptide, a carbonic anhydrase IX polypeptide, a paired box-5 (PAX5) polypeptide, an OY-TES1 (testis antigen; also known as acrosin binding protein) polypeptide, a sperm protein 17 polypeptide, a lymphocyte cell-specific protein-tyrosine kinase (LCK) polypeptide, a high molecular weight melanoma associated antigen (HMW-MAA), an A-kinase anchoring protein-4 (AKAP-4), a synovial sarcoma X breakpoint 2 (SSX2) polypeptide, an X antigen family member 1 (XAGE1) polypeptide, a B7 homolog 3 (B7H3; also known as CD276) polypeptide, a legumain polypeptide (LGMN1; also known as asparaginyl endopeptidase), a tyrosine kinase with Ig and EGF homology domains-2 (Tie-2; also known as angiopoietin-1 receptor) polypeptide, a P antigen family member 4 (PAGE4) polypeptide, a vascular endothelial growth factor receptor 2 (VEGF2) polypeptide, a MAD-CT-1 polypeptide, a fibroblast activation protein (FAP) polypeptide, a platelet derived growth factor receptor beta (PDGFβ) polypeptide, a MAD-CT-2 polypeptide, or a Fos-related antigen-1 (FOSL) polypeptide. In some cases, a human papilloma virus (HPV) antigen is specifically excluded. In some cases, an alpha-feto protein (AFP) antigen is specifically excluded. In some cases, a Wilms tumor-1 (WT1) antigen is specifically excluded.

[0192] Amino acid sequences of cancer-associated antigens are known in the art; see, e.g., MUC1 (GenBank CAA56734); LMP2 (GenBank CAA47024); EGFRvIII (GenBank NP_001333870); HER-2/neu (GenBank AAI67147); MAGE-A3 (GenBank AAH11744); p53 (GenBank BAC16799); NY-ESO-1 (GenBank CAA05908); PSMA (GenBank AAH25672); CEA (GenBank AAA51967); melan/MART1 (GenBank NP_005502); Ras (GenBank NP_001123914); gp100 (GenBank AAC60634); bcr-abl (GenBank AAB60388); tyrosinase (GenBank AAB60319); survivin (GenBank AAC51660); PSA (GenBank CAD54617); hTERT (GenBank BAC11010); SSX (GenBank NP_001265620); Eph2A (GenBank NP_004422); PAP (GenBank AAH16344); ML-IAP (GenBank AAH14475); EpCAM (GenBank NP_002345); ERG (TMPRSS2 ETS fusion) (GenBank ACA81385); PAX3 (GenBank AAI01301); ALK (GenBank NP_004295); androgen receptor (GenBank NP_000035); cyclin B1 (GenBank CAO99273); MYCN (GenBank NP_001280157); RhoC (GenBank AAH52808); TRP-2 (GenBank AAC60627); mesothelin (GenBank AAH09272); PSCA (GenBank AAH65183); MAGE A1 (GenBank NP_004979); CYP1B1 (GenBank AAM50512); PLAC1 (GenBank AAG22596); BORIS (GenBank NP_001255969); ETV6 (GenBank NP_001978); NY-BR1 (GenBank NP_443723); SART3 (GenBank NP_055521); carbonic anhydrase IX (GenBank EAW58359); PAX5 (GenBank NP_057953); OY-TES1 (GenBank NP_115878); sperm protein 17 (GenBank AAK20878); LCK (GenBank NP_001036236); HMW-MAA (GenBank NP_001888); AKAP-4 (GenBank NP_003877); SSX2 (GenBank CAA60111); XAGE1 (GenBank NP_001091073; XP_001125834; XP_001125856; and XP_001125872); B7H3 (GenBank NP_001019907; XP_947368; XP_950958; XP_950960; XP_950962; XP_950963; XP_950965; and XP_950967); LGMN1 (GenBank NP_001008530); TIE-2 (GenBank NP_000450); PAGE4 (GenBank NP_001305806); VEGFR2 (GenBank NP_002244); MAD-CT-1 (GenBank NP_005893 NP_056215); FAP (GenBank NP_004451); PDGFβ (GenBank NP_002600); MAD-CT-2 (GenBank NP_001138574); and FOSL (GenBank NP_005429). These polypeptides are also discussed in, e.g., Cheever et al. (2009) Clin. Cancer Res. 15:5323, and references cited therein; Wagner et al. (2003) J. Cell. Sci. 116:1653; Matsui et al. (1990) Oncogene 5:249; Zhang et al. (1996) Nature 383:168.

[0193] Suitable epitopes include, but are not limited to, epitopes present in an infectious disease agent, e.g., an epitope presented by a virus-encoded polypeptide. Examples of viral infectious disease agents include, e.g., Adenoviruses, Adeno-associated virus, Alphaviruses (Togaviruses), Eastern equine encephalitis virus, Eastern equine encephalomyelitis virus, Venezuelan equine encephalomyelitis vaccine strain TC-83, Western equine encephalomyelitis virus, Arenaviruses, Lymphocytic choriomeningitis virus (non-neurotropic strains), Tacaribe virus complex, Bunyaviruses, Bunyamwera virus, Rift Valley fever virus vaccine strain MP-12, Chikungunya virus, Calciviruses, Coronaviruses, Cowpox virus, Flaviviruses (Togaviruses)-Group B Arboviruses, Dengue virus serotypes 1, 2, 3, and 4, Yellow fever virus vaccine strain 17D, Hepatitis A, B, C, D, and E viruses, the Cytomegalovirus, Epstein Barr virus, Eastern Equine encephalitis virus, Herpes simplex types 1 and 2, Herpes zoster, Human herpesvirus types 6 and 7, hepatitis C virus (HVC), hepatitis B virus (HBV), Influenza viruses types A, B, and C, Papovaviruses, Newcastle disease virus, Measles virus, Mumps virus, Parainfluenza viruses types 1, 2, 3, and 4, polyomaviruses (JC virus, BK virus), Respiratory syncytial virus, Human parvovirus (B 19), Coxsackie viruses types A and B, Echoviruses, Polioviruses, Rhinoviruses, Alastrim (Variola minor virus), Smallpox (Variola major virus), Whitepox Reoviruses, Coltivirus, human Rotavirus, and Orbivirus (Colorado tick fever virus), Rabies virus, Vesicular stomatitis virus, Rubivirus (rubella), Semliki Forest virus, St. Louis encephalitis virus, Venezuelan equine encephalitis virus, Venezuelan equine encephalomyelitis virus, Arenaviruses (a.k.a. South American Hemorrhagic Fever virus), Flexal, Lymphocytic choriomeningitis virus (LCM) (neurotropic strains), Hantaviruses including Hantaan virus, Rift Valley fever virus, Japanese encephalitis virus, Yellow fever virus, Monkeypox virus, Human immunodeficiency virus (HIV) types 1 and 2, Human T cell lymphotropic virus (HTLV) types 1 and 2, Simian immunodeficiency virus (SIV), Vesicular stomatitis virus, Guanarito virus, Lassa fever virus, Junin virus, Machupo virus, Sabia, Crimean-Congo hemorrhagic fever virus, Ebola viruses, Marburg virus, Tick-borne encephalitis virus complex (flavi) including Central European tick-borne encephalitis, Far Eastern tick-borne encephalitis, Hanzalova, Hypr, Kumlinge, Kyasanur Forest disease, Omsk hemorrhagic fever, and Russian Spring Summer encephalitis viruses, Herpesvirus simiae (Herpes B or Monkey B virus), Cercopithecine herpesvirus 1 (Herpes B virus), Equine morbillivirus (Hendra and Hendra-like viruses), Nipah virus, Variola major virus (Smallpox virus), Variola minor virus (Alastrim), African swine fever virus, African horse sickness virus, Akabane virus, Avian influenza virus (highly pathogenic), Blue tongue virus, Camel pox virus, Classical swine fever virus, Cowdria ruminantium (heartwater), Foot and mouth disease virus, Goat pox virus, Japanese encephalitis virus, Lumpy skin disease virus, Malignant catarrhal fever virus, Menangle virus, Newcastle disease virus (VVND), Vesicular stomatitis virus (exotic), and Zika virus. Antigens encoded by such viruses are known in the art; a peptide epitope suitable for use in a TMMP of the present disclosure can include a peptide from any known viral antigen. In some cases, an HPV antigen is specifically excluded. In some cases, an HBV antigen is specifically excluded.

[0194] In some cases, the epitope peptide present in a TMMP of the present disclosure presents an epitope specific to an HLA-A, -B, -C, -E, -F, or -G allele. In an embodiment, the epitope peptide present in a TMMP presents an epitope restricted to HLA-A*0101, A*0201, A*0301, A*1101, A*2301, A*2402, A*2407, A*3303, and/or A*3401. In an embodiment, the epitope peptide present in a TMMP presents an epitope restricted to HLA-B*0702, B*0801, B*1502, B*3802, B*4001, B*4601, and/or B*5301. In an embodiment, the epitope peptide present in a TMMP presents an epitope restricted to C*0102, C*0303, C*0304, C*0401, C*0602, C*0701, C*702, C*0801, and/or C*1502.

### MLA/Peptide Binding Assays

[0195] Whether a given peptide (e.g., a peptide that comprises an epitope) binds a class I HLA (comprising an HLA heavy chain and a β2M polypeptide), and, when bound to the HLA complex, can effectively present an epitope to a TCR, can be determined using any of a number of well-known methods. Assays include binding assays and T-cell activation assays.

### Cell-Based Binding Assay

[0196] As one example, a cell-based peptide-induced stabilization assay can be used to determine peptide-HLA class I binding. In this assay, a peptide of interest is allowed to bind to a TAP-deficient cell, i.e., a cell that has defective transporter associated with antigen processing (TAP) machinery, and consequently, few surface class I molecules. Such cells include, e.g., the human T2 cell line (T2 (174×CEM.T2; American Type Culture Collection (ATCC) No. CRL-1992). Henderson et al. (1992) Science 255:1264. Without efficient TAP-mediated transport of cytosolic peptides into the endoplasmic reticulum, assembled class I complexes are structurally unstable, and retained only transiently at the cell surface. However, when T2 cells are incubated with an exogenous peptide capable of binding class I, surface peptide-HLA class I complexes are stabilized and can be detected by flow cytometry with, e.g., a pan anti-class I monoclonal antibody. The stabilization and resultant increased life-span of peptide-HLA complexes on the cell surface by the addition of a peptide validates their identity. Analysis can be carried out using flow cytometry, e.g., where the pan-HLA class I antibody comprises a fluorescent label. Binding of the peptide to various allelic forms of HLA H chains can be tested by genetically modifying the T2 cells to express an allelic HLA H chain of interest.

[0197] The following is a non-limiting example of use of a T2 assay to assess peptide binding to HLA A*0201. T2 cells are washed in cell culture medium, and concentrated to 10⁶ cells/ml. Peptides of interest are prepared in cell culture medium and serially diluted providing concentrations of 200 μM, 100 μM, 20 μM and 2 μM. The cells are mixed 1:1 with each peptide dilution to give a final volume of 200 μL and final peptide concentrations of 100 μM, 50 μM, 10 μM and 1 μM. A HLA A*0201 binding peptide, GILGFVFTL, and a non-HLA A*0201-restricted peptide, HPVGEADYF (HLA-B*3501), are included as positive and negative controls, respectively. The cell/peptide mixtures are kept at 37° C. 5% CO₂ for ten minutes; then incubated at room temperature overnight. Cells are then incubated for 2 hours at 37° C. and stained with a fluorescently-labeled anti-human HLA antibody. The cells are washed twice with phosphate-buffered saline and analyzed using flow cytometry. The average mean fluorescence intensity (MFI) of the anti-HLA antibody staining is used to measure the strength of binding.

### Biochemical Binding Assay

[0198] HLA polypeptides (HLA heavy chain polypeptide complexed with β2M polypeptide) can be tested for binding to a peptide of interest in a cell-free in vitro assay system. For example, a labeled reference peptide (e.g., fluorescently labeled) is allowed to bind to HLA polypeptides (HLA heavy chain polypeptide complexed with β2M polypeptide), to form an HLA-reference peptide complex. The ability of a test peptide of interest to displace the labeled reference peptide from the HLA-reference peptide complex is tested. The relative binding affinity is calculated as the amount of test peptide needed to displace the bound reference peptide. See, e.g., van der Burg et al. (1995) Human Immunol. 44:189.

[0199] As another example, a peptide of interest can be incubated with an HLA molecule (HLA heavy chain complexed with a β2M polypeptide), and the stabilization of the HLA/peptide complex can be measured in an immunoassay format. The ability of a peptide of interest to stabilize an HLA molecule is compared to that of a control peptide presenting a known T-cell epitope. Detection of stabilization is based on the presence or absence of the native conformation of the HLA/peptide complex, detected using an anti-HLA antibody. See, e.g., Westrop et al. (2009) J. Immunol. Methods 341:76; Steinitz et al. (2012) Blood 119:4073; and U.S. Pat. No. 9,205,144.

### T-Cell Activation Assays

[0200] Whether a given peptide binds a class I HLA (comprising an HLA heavy chain and a β2M polypeptide), and, when bound to the HLA complex, can effectively present an epitope to a TCR, can be determined by assessing T-cell response to the peptide-HLA complex. T-cell responses that can be measured include, e.g., interferon-gamma (IFNγ) production, cytotoxic activity, and the like.

### ELISPOT Assay

[0201] Suitable assays include, e.g., an enzyme linked immunospot (ELISPOT) assay. In this assay, production of IFNγ by CD8⁺ T cells is measured following with an antigen-presenting cell (APC) that presents a peptide of interest complexed with HLA class I. Antibody to IFNγ is immobilized on wells of a multi-well plate. APCs are added to the wells, and incubated for a period of time with a peptide of interest, such that the peptide binds HLA class I on the surface of the APCs. CD8⁺ T cells specific for the peptide are added to the wells, and the plate is incubated for about 24 hours. The wells are then washed, and any IFNγ bound to the immobilized anti-IFNγ antibody is detected using a detectably labeled anti-IFNγ antibody. A colorimetric assay can be used. For example, the detectably labeled anti-IFNγ antibody can be a biotin-labeled anti-IFNγ antibody, which can be detected using, e.g., streptavidin conjugated to alkaline phosphatase. A BCIP/NBT (5-bromo-4-chloro-3-indolyl phosphate/nitro blue tetrazolium) solution is added, to develop the assay. The presence of IFNγ-secreting T cells is identified by colored spots. Negative controls include APCs not contacted with the peptide. APCs expressing various HLA H chain alleles can be used to determine whether a peptide of interest effectively binds to a HLA class I molecule comprising a particular HLA H chain.

### Cytotoxicity Assays

[0202] Whether a given peptide binds to a particular HLA class I H chain and, when bound to a HLA class I complex comprising the H chain, can effectively present an epitope to a TCR, can also be determined using a cytotoxicity assay. A cytotoxicity assay involves incubation of a target cell with a cytotoxic CD8⁺ T cell. The target cell displays on its surface a peptide/HLA class I complex comprising a peptide of interest and an HLA class I molecule comprising an HLA H chain to be tested. The target cells can be radioactively labeled, e.g., with ⁵¹Cr. Whether the target cell effectively presents an epitope to a TCR on the cytotoxic CD8⁺ T cell, thereby inducing cytotoxic activity by the CD8⁺ T cell toward the target cell, is determined by measuring release of ⁵¹Cr from the lysed target cell. Specific cytotoxicity can be calculated as the amount of cytotoxic activity in the presence of the peptide minus the amount of cytotoxic activity in the absence of the peptide.

Detection of Antigen-Specific T Cells with Peptide-HLA Tetramers

[0203] As another example, multimers (e.g., tetramers) of peptide-HLA complexes are generated with fluorescent or heavy metal tags. The multimers can then be used to identify and quantify specific T cells via flow cytometry (FACS) or mass cytometry (CyTOF). Detection of epitope-specific T cells provides direct evidence that the peptide-bound HLA molecule is capable of binding to a specific TCR on a subset of antigen-specific T cells. See, e.g., Klenerman et al. (2002) Nature Reviews Immunol. 2:263.

### Immunomodulatory Polypeptides

[0204] In some cases, an immunomodulatory polypeptide present in a TMMP of the present disclosure is a wild-type immunomodulatory polypeptide. In other cases, an immunomodulatory polypeptide present in a TMMP of the present disclosure is a variant immunomodulatory polypeptide that has reduced affinity for a co-immunomodulatory polypeptide, compared to the affinity of a corresponding wild-type immunomodulatory polypeptide for the co-immunomodulatory polypeptide. Suitable immunomodulatory domains that exhibit reduced affinity for a co-immunomodulatory domain can have from 1 amino acid (aa) to 20 aa differences from a wild-type immunomodulatory domain. For example, in some cases, a variant immunomodulatory polypeptide present in a TMMP of the present disclosure differs in amino acid sequence by 1 aa, 2 aa, 3 aa, 4 aa, 5 aa, 6 aa, 7 aa, 8 aa, 9 aa, or 10 aa, from a corresponding wild-type immunomodulatory polypeptide. As another example, in some cases, a variant immunomodulatory polypeptide present in a TMMP of the present disclosure differs in amino acid sequence by 11 aa, 12 aa, 13 aa, 14 aa, 15 aa, 16 aa, 17 aa, 18 aa, 19 aa, or 20 aa, from a corresponding wild-type immunomodulatory polypeptide. As an example, in some cases, a variant immunomodulatory polypeptide present in a TMMP of the present disclosure includes 1, 2, 3, 4, 5, 6, 7, 8, 9, or 10 amino acid substitutions, compared to a corresponding reference (e.g., wild-type) immunomodulatory polypeptide. In some cases, variant immunomodulatory polypeptide present in a TMMP of the present disclosure includes a single amino acid substitution compared to a corresponding reference (e.g., wild-type) immunomodulatory polypeptide. In some cases, variant immunomodulatory polypeptide present in a TMMP of the present disclosure includes 2 amino acid substitutions (e.g., no more than 2 amino acid substitutions) compared to a corresponding reference (e.g., wild-type) immunomodulatory polypeptide. In some cases, variant immunomodulatory polypeptide present in a TMMP of the present disclosure includes 3 amino acid substitutions (e.g., no more than 3 amino acid substitutions) compared to a corresponding reference (e.g., wild-type) immunomodulatory polypeptide. In some cases, variant immunomodulatory polypeptide present in a TMMP of the present disclosure includes 4 amino acid substitutions (e.g., no more than 4 amino acid substitutions) compared to a corresponding reference (e.g., wild-type) immunomodulatory polypeptide. In some cases, variant immunomodulatory polypeptide present in a TMMP of the present disclosure includes 5 amino acid substitutions (e.g., no more than 5 amino acid substitutions) compared to a corresponding reference (e.g., wild-type) immunomodulatory polypeptide. In some cases, variant immunomodulatory polypeptide present in a TMMP of the present disclosure includes 6 amino acid substitutions (e.g., no more than 6 amino acid substitutions) compared to a corresponding reference (e.g., wild-type) immunomodulatory polypeptide. In some cases, variant immunomodulatory polypeptide present in a TMMP of the present disclosure includes 7 amino acid substitutions (e.g., no more than 7 amino acid substitutions) compared to a corresponding reference (e.g., wild-type) immunomodulatory polypeptide. In some cases, variant immunomodulatory polypeptide present in a TMMP of the present disclosure includes 8 amino acid substitutions (e.g., no more than 8 amino acid substitutions) compared to a corresponding reference (e.g., wild-type) immunomodulatory polypeptide. In some cases, variant immunomodulatory polypeptide present in a TMMP of the present disclosure includes 9 amino acid substitutions (e.g., no more than 9 amino acid substitutions) compared to a corresponding reference (e.g., wild-type) immunomodulatory polypeptide. In some cases, variant immunomodulatory polypeptide present in a TMMP of the present disclosure includes 10 amino acid substitutions (e.g., no more than 10 amino acid substitutions) compared to a corresponding reference (e.g., wild-type) immunomodulatory polypeptide.

[0205] In some cases, variant immunomodulatory polypeptide present in a TMMP of the present disclosure includes 11 amino acid substitutions (e.g., no more than 11 amino acid substitutions) compared to a corresponding reference (e.g., wild-type) immunomodulatory polypeptide.

[0206] In some cases, variant immunomodulatory polypeptide present in a TMMP of the present disclosure includes 12 amino acid substitutions (e.g., no more than 12 amino acid substitutions) compared to a corresponding reference (e.g., wild-type) immunomodulatory polypeptide.

[0207] In some cases, variant immunomodulatory polypeptide present in a TMMP of the present disclosure includes 13 amino acid substitutions (e.g., no more than 13 amino acid substitutions) compared to a corresponding reference (e.g., wild-type) immunomodulatory polypeptide.

[0208] In some cases, variant immunomodulatory polypeptide present in a TMMP of the present disclosure includes 14 amino acid substitutions (e.g., no more than 14 amino acid substitutions) compared to a corresponding reference (e.g., wild-type) immunomodulatory polypeptide.

[0209] In some cases, variant immunomodulatory polypeptide present in a TMMP of the present disclosure includes 15 amino acid substitutions (e.g., no more than 15 amino acid substitutions) compared to a corresponding reference (e.g., wild-type) immunomodulatory polypeptide.

[0210] In some cases, variant immunomodulatory polypeptide present in a TMMP of the present disclosure includes 16 amino acid substitutions (e.g., no more than 16 amino acid substitutions) compared to a corresponding reference (e.g., wild-type) immunomodulatory polypeptide.

[0211] In some cases, variant immunomodulatory polypeptide present in a TMMP of the present disclosure includes 17 amino acid substitutions (e.g., no more than 17 amino acid substitutions) compared to a corresponding reference (e.g., wild-type) immunomodulatory polypeptide.

[0212] In some cases, variant immunomodulatory polypeptide present in a TMMP of the present disclosure includes 18 amino acid substitutions (e.g., no more than 18 amino acid substitutions) compared to a corresponding reference (e.g., wild-type) immunomodulatory polypeptide.

[0213] In some cases, variant immunomodulatory polypeptide present in a TMMP of the present disclosure includes 19 amino acid substitutions (e.g., no more than 19 amino acid substitutions) compared to a corresponding reference (e.g., wild-type) immunomodulatory polypeptide.

[0214] In some cases, variant immunomodulatory polypeptide present in a TMMP of the present disclosure includes 20 amino acid substitutions (e.g., no more than 20 amino acid substitutions) compared to a corresponding reference (e.g., wild-type) immunomodulatory polypeptide.

[0215] As discussed above, a variant immunomodulatory polypeptide suitable for inclusion in a TMMP of the present disclosure exhibits reduced affinity for a cognate co-immunomodulatory polypeptide, compared to the affinity of a corresponding wild-type immunomodulatory polypeptide for the cognate co-immunomodulatory polypeptide.

[0216] Exemplary pairs of immunomodulatory polypeptide and cognate co-immunomodulatory polypeptide include, but are not limited to:

[0217] a) 4-1BBL (immunomodulatory polypeptide) and 4-1BB (cognate co-immunomodulatory polypeptide);

[0218] b) PD-L1 (immunomodulatory polypeptide) and PD1 (cognate co-immunomodulatory polypeptide);

[0219] c) IL-2 (immunomodulatory polypeptide) and IL-2 receptor (cognate co-immunomodulatory polypeptide);

[0220] d) CD80 (immunomodulatory polypeptide) and CD86 (cognate co-immunomodulatory polypeptide);

[0221] e) CD86 (immunomodulatory polypeptide) and CD28 (cognate co-immunomodulatory polypeptide);

[0222] f) OX40L (CD252) (immunomodulatory polypeptide) and OX40 (CD134) (cognate co-immunomodulatory polypeptide);

[0223] g) Fas ligand (immunomodulatory polypeptide) and Fas (cognate co-immunomodulatory polypeptide);

[0224] h) ICOS-L (immunomodulatory polypeptide) and ICOS (cognate co-immunomodulatory polypeptide);

[0225] i) ICAM (immunomodulatory polypeptide) and LFA-1 (cognate co-immunomodulatory polypeptide);

[0226] j) CD30L (immunomodulatory polypeptide) and CD30 (cognate co-immunomodulatory polypeptide);

[0227] k) CD40 (immunomodulatory polypeptide) and CD40L (cognate co-immunomodulatory polypeptide);

[0228] l) CD83 (immunomodulatory polypeptide) and CD83L (cognate co-immunomodulatory polypeptide);

[0229] m) HVEM (CD270) (immunomodulatory polypeptide) and CD160 (cognate co-immunomodulatory polypeptide);

[0230] n) JAG1 (CD339) (immunomodulatory polypeptide) and Notch (cognate co-immunomodulatory polypeptide);

[0231] o) JAG1 (immunomodulatory polypeptide) and CD46 (cognate co-immunomodulatory polypeptide);

[0232] p) CD80 (immunomodulatory polypeptide) and CTLA4 (cognate co-immunomodulatory polypeptide);

[0233] q) CD86 (immunomodulatory polypeptide) and CTLA4 (cognate co-immunomodulatory polypeptide); and

[0234] r) CD70 (immunomodulatory polypeptide) and CD27 (cognate co-immunomodulatory polypeptide).

[0235] In some cases, a variant immunomodulatory polypeptide present in a TMMP of the present disclosure has a binding affinity for a cognate co-immunomodulatory polypeptide that is from 100 nM to 100 μM. For example, in some cases, a variant immunomodulatory polypeptide present in a TMMP of the present disclosure has a binding affinity for a cognate co-immunomodulatory polypeptide that is from about 100 nM to 150 nM, from about 150 nM to about 200 nM, from about 200 nM to about 250 nM, from about 250 nM to about 300 nM, from about 300 nM to about 350 nM, from about 350 nM to about 400 nM, from about 400 nM to about 500 nM, from about 500 nM to about 600 nM, from about 600 nM to about 700 nM, from about 700 nM to about 800 nM, from about 800 nM to about 900 nM, from about 900 nM to about 1 μM, to about 1 μM to about 5 μM, from about 5 μM to about 10 μM, from about 10 μM to about 15 μM, from about 15 μM to about 20 μM, from about 20 μM to about 25 μM, from about 25 μM to about 50 μM, from about 50 μM to about 75 μM, or from about 75 μM to about 100 μM.

[0236] A variant immunomodulatory polypeptide present in a TMMP of the present disclosure exhibits reduced affinity for a cognate co-immunomodulatory polypeptide. Similarly, a TMMP of the present disclosure that comprises a variant immunomodulatory polypeptide exhibits reduced affinity for a cognate co-immunomodulatory polypeptide. Thus, for example, a TMMP of the present disclosure that comprises a variant immunomodulatory polypeptide has a binding affinity for a cognate co-immunomodulatory polypeptide that is from 100 nM to 100 μM. For example, in some cases, a TMMP of the present disclosure that comprises a variant immunomodulatory polypeptide has a binding affinity for a cognate co-immunomodulatory polypeptide that is from about 100 nM to 150 nM, from about 150 nM to about 200 nM, from about 200 nM to about 250 nM, from about 250 nM to about 300 nM, from about 300 nM to about 350 nM, from about 350 nM to about 400 nM, from about 400 nM to about 500 nM, from about 500 nM to about 600 nM, from about 600 nM to about 700 nM, from about 700 nM to about 800 nM, from about 800 nM to about 900 nM, from about 900 nM to about 1 μM, to about 1 μM to about 5 μM, from about 5 μM to about 10 μM, from about 10 μM to about 15 μM, from about 15 μM to about 20 μM, from about 20 μM to about 25 μM, from about 25 μM to about 50 μM, from about 50 μM to about 75 μM, or from about 75 μM to about 100 μM.

[0237] As depicted schematically in FIG. 14, an immunomodulatory polypeptide (i.e., one or more immunomodulatory polypeptides) can be present in a TMMP of the present disclosure at any of a variety of positions. FIG. 14 depicts the position of two copies of a variant IL-2 polypeptide; however, the immunomodulatory polypeptide can be any of a variety of immunomodulatory polypeptide, as described herein. As depicted in FIG. 14, an immunomodulatory polypeptide can be: 1) N-terminal to the MHC class I heavy chain; 2) C-terminal to the MHC class I heavy chain and N-terminal to the Ig Fc polypeptide; in other words, between the MHC class I heavy chain and the Ig Fc polypeptide; 3) C-terminal to the Ig Fc polypeptide; 4) N-terminal to the peptide epitope; or 5) C-terminal to the β2M polypeptide.

### PD-L1 Variants

[0238] As one non-limiting example, in some cases, a variant immunomodulatory polypeptide present in a TMMP of the present disclosure is a variant PD-L1 polypeptide. Wild-type PD-L1 binds to PD1.

[0239] A wild-type human PD-L1 polypeptide can comprise the following amino acid sequence:

(SEQ ID NO: 1)
MRIFAVFIFM TYWHLLNAFT VTVPKDLYVV EYGSNMTIEC
KFPVEKQLDL AALIVYWEME DKNIIQFVHG EEDLKVQHSS
YRQRARLLKD QLSLGNAALQ ITDVKLQDAG VYRCMISYGG
ADYKRITVKV NAPYNKINQR ILVVDPVTSE HELTCQAEGY
PKAEVIWTSS DHQVLSGKTT TTNSKREEKL FNVTSTLRIN
TTTNEIFYCT FRRLDPEENH TAELVIPGNI LNVSIKICLT
LSPST.

[0240] A wild-type human PD-L1 ectodomain can comprise the following amino acid sequence:

(SEQ ID NO: 2)
FT VTVPKDLYVV EYGSNMTIEC KFPVEKQLDL AALIVYWEME
DKNIIQFVHG EEDLKVQHSS YRQRARLLKD QLSLGNAALQ
ITDVKLQDAG VYRCMISYGG ADYKRITVKV NAPYNKINQR
ILVVDPVTSE HELTCQAEGY PKAEVIWTSS DHQVLSGKTT
TTNSKREEKL FNVTSTLRIN TTTNEIFYCT FRRLDPEENH
TAELVIPGNI LNVSIKI.

[0241] A wild-type PD-1 polypeptide can comprise the following amino acid sequence:

(SEQ ID NO: 3)
PGWFLDSPDR PWNPPTFSPA LLVVTEGDNA TFTCSFSNTS
ESFVLNWYRM SPSNQTDKLA AFPEDRSQPG QDCRFRVTQL
PNGRDFHMSV VRARRNDSGT YLCGAISLAP KAQIKESLRA
ELRVTERRAE VPTAHPSPSP RPAGQFQTLV VGVVGGLLGS
LVLLVWVLAV ICSRAARGTI GARRTGQPLK EDPSAVPVFS
VDYGELDFQW REKTPEPPVP CVPEQTEYAT IVFPSGMGTS
SPARRGSADG PRSAQPLRPE DGHCSWPL.

In some cases, where a TMMP of the present disclosure comprises a variant PD-L1 polypeptide, a “cognate co-immunomodulatory polypeptide” is a PD-1 polypeptide comprising the amino acid sequence of SEQ ID NO:3.

[0242] In some cases, a variant PD-L1 polypeptide exhibits reduced binding affinity to PD-1 (e.g., a PD-1 polypeptide comprising the amino acid sequence set forth in SEQ ID NO:3), compared to the binding affinity of a PD-L1 polypeptide comprising the amino acid sequence set forth in SEQ ID NO:1 or SEQ ID NO:2. For example, in some cases, a variant PD-L1 polypeptide of the present disclosure binds PD-1 (e.g., a PD-1 polypeptide comprising the amino acid sequence set forth in SEQ ID NO:3) with a binding affinity that is at least 10%, at least 15%, at least 20%, at least 25%, at least 30%, at least 35%, at least 40%, at least 45%, at least 50% less, at least 55% less, at least 60% less, at least 65% less, at least 70% less, at least 75% less, at least 80% less, at least 85% less, at least 90% less, at least 95% less, or more than 95% less, than the binding affinity of a PD-L1 polypeptide comprising the amino acid sequence set forth in SEQ ID NO:1 or SEQ ID NO:2.

[0243] In some cases, a variant PD-L1 polypeptide has a binding affinity to PD-1 that is from 1 nM to 1 mM. In some cases, a variant PD-L1 polypeptide of the present disclosure has a binding affinity to PD-1 that is from 100 nM to 100 μM. As another example, in some cases, a variant PD-L1 polypeptide has a binding affinity for PD1 (e.g., a PD1 polypeptide comprising the amino acid sequence set forth in SEQ ID NO:3) that is from about 100 nM to 150 nM, from about 150 nM to about 200 nM, from about 200 nM to about 250 nM, from about 250 nM to about 300 nM, from about 300 nM to about 350 nM, from about 350 nM to about 400 nM, from about 400 nM to about 500 nM, from about 500 nM to about 600 nM, from about 600 nM to about 700 nM, from about 700 nM to about 800 nM, from about 800 nM to about 900 nM, from about 900 nM to about 1 μM, to about 1 μM to about 5 μM, from about 5 μM to about 10 μM, from about 10 μM to about 15 μM, from about 15 μM to about 20 μM, from about 20 μM to about 25 μM, from about 25 μM to about 50 μM, from about 50 μM to about 75 μM, or from about 75 μM to about 100 μM.

[0244] In some cases, a variant PD-L1 polypeptide has a single amino acid substitution compared to the PD-L1 amino acid sequence set forth in SEQ ID NO:1 or SEQ ID NO:2. In some cases, a variant PD-L1 polypeptide has from 2 to 10 amino acid substitutions compared to the PD-L1 amino acid sequence set forth in SEQ ID NO:1 or SEQ ID NO:2. In some cases, a variant PD-L1 polypeptide has 2 amino acid substitutions compared to the PD-L1 amino acid sequence set forth in SEQ ID NO:1 or SEQ ID NO:2. In some cases, a variant PD-L1 polypeptide has 3 amino acid substitutions compared to the PD-L1 amino acid sequence set forth in SEQ ID NO:1 or SEQ ID NO:2. In some cases, a variant PD-L1 polypeptide has 4 amino acid substitutions compared to the PD-L1 amino acid sequence set forth in SEQ ID NO:1 or SEQ ID NO:2. In some cases, a variant PD-L1 polypeptide has 5 amino acid substitutions compared to the PD-L1 amino acid sequence set forth in SEQ ID NO:1 or SEQ ID NO:2. In some cases, a variant PD-L1 polypeptide has 6 amino acid substitutions compared to the PD-L1 amino acid sequence set forth in SEQ ID NO:1 or SEQ ID NO:2. In some cases, a variant PD-L1 polypeptide has 7 amino acid substitutions compared to the PD-L1 amino acid sequence set forth in SEQ ID NO:1 or SEQ ID NO:2. In some cases, a variant PD-L1 polypeptide has 8 amino acid substitutions compared to the PD-L1 amino acid sequence set forth in SEQ ID NO:1 or SEQ ID NO:2. In some cases, a variant PD-L1 polypeptide has 9 amino acid substitutions compared to the PD-L1 amino acid sequence set forth in SEQ ID NO:1 or SEQ ID NO:2. In some cases, a variant PD-L1 polypeptide has 10 amino acid substitutions compared to the PD-L1 amino acid sequence set forth in SEQ ID NO:1 or SEQ ID NO:2.

[0245] A suitable PD-L1 variant includes a polypeptide that comprises an amino acid sequence having at least 90%, at least 95%, at least 98%, at least 99%, or 100%, amino acid sequence identity to the following amino acid sequence:

(SEQ ID NO: 52)
FT VTVPKXLYVV EYGSNMTIEC KFPVEKQLDL AALIVYWEME
DKNIIQFVHG EEDLKVQHSS YRQRARLLKD QLSLGNAALQ
ITDVKLQDAG VYRCMISYGG ADYKRITVKV NAPYNKINQR
ILVVDPVTSE HELTCQAEGY PKAEVIWTSS DHQVLSGKTT
TTNSKREEKL FNVTSTLRIN TTTNEIFYCT FRRLDPEENH
TAELVIPGNI LNVSIKI,

where X is any amino acid other than Asp. In some cases, X is Ala. In some cases, X is Arg.

[0246] A suitable PD-L1 variant includes a polypeptide that comprises an amino acid sequence having at least 90%, at least 95%, at least 98%, at least 99%, or 100%, amino acid sequence identity to the following amino acid sequence:

(SEQ ID NO: 53)
FT VTVPKDLYVV EYGSNMTIEC KFPVEKQLDL AALXVYWEME
DKNIIQFVHG EEDLKVQHSS YRQRARLLKD QLSLGNAALQ
ITDVKLQDAG VYRCMISYGG ADYKRITVKV NAPYNKINQR
ILVVDPVTSE HELTCQAEGY PKAEVIWTSS DHQVLSGKTT
TTNSKREEKL FNVTSTLRIN TTTNEIFYCT FRRLDPEENH
TAELVIPGNI LNVSIKI,

where X is any amino acid other than Ile. In some cases, X is Asp.

[0247] A suitable PD-L1 variant includes a polypeptide that comprises an amino acid sequence having at least 90%, at least 95%, at least 98%, at least 99%, or 100%, amino acid sequence identity to the following amino acid sequence:

(SEQ ID NO: 54)
FT VTVPKDLYVV EYGSNMTIEC KFPVEKQLDL AALIVYWEME
DKNIIQFVHG EXDLKVQHSS YRQRARLLKD QLSLGNAALQ
ITDVKLQDAG VYRCMISYGG ADYKRITVKV NAPYNKINQR
ILVVDPVTSE HELTCQAEGY PKAEVIWTSS DHQVLSGKTT
TTNSKREEKL FNVTSTLRIN TTTNEIFYCT FRRLDPEENH
TAELVIPGNI LNVSIKI,

where X is any amino acid other than Glu. In some cases, X is Arg.

### CD80 Variants

[0248] In some cases, a variant immunomodulatory polypeptide present in a TMMP of the present disclosure is a variant CD80 polypeptide. Wild-type CD80 binds to CD28. Wild-type CD80 also binds to CD86.

[0249] A wild-type amino acid sequence of the ectodomain of human CD80 can be as follows:

(SEQ ID NO: 4)
VIHVTK EVKEVATLSC GHNVSVEELA QTRIYWQKEK
KMVLTMMSGD MNIWPEYKNR TIFDITNNLS IVILALRPSD
EGTYECVVLK YEKDAFKREH LAEVTLSVKA DFPTPSISDF
EIPTSNIRRI ICSTSGGFPE PHLSWLENGE ELNAINTTVS
QDPETELYAV SSKLDFNMTT NHSFMCLIKY GHLRVNQTFN
WNTTKQEHFP DN.

[0250] A wild-type CD28 amino acid sequence can be as follows:

(SEQ ID NO: 5)
MLRLLLALNL FPSIQVTGNK ILVKQSPMLV AYDNAVNLSC
KYSYNLFSRE FRASLHKGLD SAVEVCVVYG NYSQQLQVYS
KTGFNCDGKL GNESVTFYLQ NLYVNQTDIY FCKIEVMYPP
PYLDNEKSNG TIIHVKGKHL CPSPLFPGPS KPFWVLVVVG
GVLACYSLLV TVAFIIFWVR SKRSRLLHSD YMNMTPRRPG
PTRKHYQPYA PPRDFAAYRS.

In some cases, where a TMMP of the present disclosure comprises a variant CD80 polypeptide, a “cognate co-immunomodulatory polypeptide” is a CD28 polypeptide comprising the amino acid sequence of SEQ ID NO:5.

[0251] A wild-type CD28 amino acid sequence can be as follows: MLRLLLALNL

(SEQ ID NO: 6)
FPSIQVTGNK ILVKQSPMLV AYDNAVNLSW KHLCPSPLFP
GPSKPFWVLV VVGGVLACYS LLVTVAFIIF WVRSKRSRLL
HSDYMNMTPR RPGPTRKHYQ PYAPPRDFAA YRS

[0252] A wild-type CD28 amino acid sequence can be as follows: MLRLLLALNL

(SEQ ID NO: 7)
FPSIQVTGKH LCPSPLFPGP SKPFWVLVVV GGVLACYSLL
VTVAFIIFWV RSKRSRLLHS DYMNMTPRRP GPTRKHYQPY
APPRDFAAYR S.

[0253] In some cases, a variant CD80 polypeptide exhibits reduced binding affinity to CD28, compared to the binding affinity of a CD80 polypeptide comprising the amino acid sequence set forth in SEQ ID NO:4 for CD28. For example, in some cases, a variant CD80 polypeptide binds CD28 with a binding affinity that is at least 10%, at least 15%, at least 20%, at least 25%, at least 30%, at least 35%, at least 40%, at least 45%, at least 50% less, at least 55% less, at least 60% less, at least 65% less, at least 70% less, at least 75% less, at least 80% less, at least 85% less, at least 90% less, at least 95% less, or more than 95% less, than the binding affinity of a CD80 polypeptide comprising the amino acid sequence set forth in SEQ ID NO:4 for CD28 (e.g., a CD28 polypeptide comprising the amino acid sequence set forth in one of SEQ ID NO:5, 6, or 7).

[0254] In some cases, a variant CD80 polypeptide has a binding affinity to CD28 that is from 100 nM to 100 μM. As another example, in some cases, a variant CD80 polypeptide of the present disclosure has a binding affinity for CD28 (e.g., a CD28 polypeptide comprising the amino acid sequence set forth in SEQ ID NO:5, SEQ ID NO:6, or SEQ ID NO:7) that is from about 100 nM to 150 nM, from about 150 nM to about 200 nM, from about 200 nM to about 250 nM, from about 250 nM to about 300 nM, from about 300 nM to about 350 nM, from about 350 nM to about 400 nM, from about 400 nM to about 500 nM, from about 500 nM to about 600 nM, from about 600 nM to about 700 nM, from about 700 nM to about 800 nM, from about 800 nM to about 900 nM, from about 900 nM to about 1 μM, to about 1 μM to about 5 μM, from about 5 μM to about 10 μM, from about 10 μM to about 15 μM, from about 15 μM to about 20 μM, from about 20 μM to about 25 μM, from about 25 μM to about 50 μM, from about 50 μM to about 75 μM, or from about 75 μM to about 100 μM.

[0255] In some cases, a variant CD80 polypeptide has a single amino acid substitution compared to the CD80 amino acid sequence set forth in SEQ ID NO:4. In some cases, a variant CD80 polypeptide has from 2 to 10 amino acid substitutions compared to the CD80 amino acid sequence set forth in SEQ ID NO:4. In some cases, a variant CD80 polypeptide has 2 amino acid substitutions compared to the CD80 amino acid sequence set forth in SEQ ID NO:4. In some cases, a variant CD80 polypeptide has 3 amino acid substitutions compared to the CD80 amino acid sequence set forth in SEQ ID NO:4. In some cases, a variant CD80 polypeptide has 4 amino acid substitutions compared to the CD80 amino acid sequence set forth in SEQ ID NO:4. In some cases, a variant CD80 polypeptide has 5 amino acid substitutions compared to the CD80 amino acid sequence set forth in SEQ ID NO:4. In some cases, a variant CD80 polypeptide has 6 amino acid substitutions compared to the CD80 amino acid sequence set forth in SEQ ID NO:4. In some cases, a variant CD80 polypeptide has 7 amino acid substitutions compared to the CD80 amino acid sequence set forth in SEQ ID NO:4. In some cases, a variant CD80 polypeptide has 8 amino acid substitutions compared to the CD80 amino acid sequence set forth in SEQ ID NO:4. In some cases, a variant CD80 polypeptide has 9 amino acid substitutions compared to the CD80 amino acid sequence set forth in SEQ ID NO:4. In some cases, a variant CD80 polypeptide has 10 amino acid substitutions compared to the CD80 amino acid sequence set forth in SEQ ID NO:4.

[0256] Suitable CD80 variants include a polypeptide that comprises an amino acid sequence having at least 90%, at least 95%, at least 98%, at least 99%, or 100%, amino acid sequence identity to any one of the following amino acid sequences:

(SEQ ID NO: 55)
VIHVTK EVKEVATLSC GHXVSVEELA QTRIYWQKEK KMVLTMMSGD
MNIWPEYKNR TIFDITNNLS IVILALRPSD EGTYECVVLK
YEKDAFKREH LAEVTLSVKA DFPTPSISDF EIPTSNIRRI
ICSTSGGFPE PHLSWLENGE ELNAINTTVS QDPETELYAV
SSKLDFNMTT NHSFMCLIKY GHLRVNQTFN WNTTKQEHFP DN,

where X is any amino acid other than Asn. In some cases, X is Ala;

[0257] VIHVTK EVKEVATLSC GHNVSVEELA QTRIYWQKEK KMVLTMMSGD

(SEQ ID NO: 56)
MNIWPEYKNR TIFDITXNLS IVILALRPSD EGTYECVVLK
YEKDAFKREH LAEVTLSVKA DFPTPSISDF EIPTSNIRRI
ICSTSGGFPE PHLSWLENGE ELNAINTTVS QDPETELYAV
SSKLDFNMTT NHSFMCLIKY GHLRVNQTFN WNTTKQEHFP DN,

where X is any amino acid other than Asn. In some cases, X is Ala;

(SEQ ID NO: 57)
VIHVTK EVKEVATLSC GHNVSVEELA QTRIYWQKEK KMVLTMMSGD
MNIWPEYKNR TIFDITNNLS XVILALRPSD EGTYECVVLK
YEKDAFKREH LAEVTLSVKA DFPTPSISDF EIPTSNIRRI
ICSTSGGFPE PHLSWLENGE ELNAINTTVS QDPETELYAV
SSKLDFNMTT NHSFMCLIKY GHLRVNQTFN WNTTKQEHFP DN,

where X is any amino acid other than Ile. In some cases, X is Ala;

(SEQ ID NO: 58)
VIHVTK EVKEVATLSC GHNVSVEELA QTRIYWQKEK KMVLTMMSGD
MNIWPEYKNR TIFDITNNLS IVILALRPSD EGTYECVVLX
YEKDAFKREH LAEVTLSVKA DFPTPSISDF EIPTSNIRRI
ICSTSGGFPE PHLSWLENGE ELNAINTTVS QDPETELYAV
SSKLDFNMTT NHSFMCLIKY GHLRVNQTFN WNTTKQEHFP DN,

where X is any amino acid other than Lys. In some cases, X is Ala;

(SEQ ID NO: 60)
VIHVTK EVKEVATLSC GHNVSVEELA QTRIYWQKEK KMVLTMMSGD
MNIWPEYKNR TIFDITNNLS IVILALRPSD EGTYECVVLK
YEKDAFKREH LAEVTLSVKA DFPTPSISDF EIPTSNIRRI
ICSTSGGFPE PHLSWLENGE ELNAINTTVS XDPETELYAV
SSKLDFNMTT NHSFMCLIKY GHLRVNQTFN WNTTKQEHFP DN,

where X is any amino acid other than Gln. In some cases, X is Ala;

(SEQ ID NO: 61)
VIHVTK EVKEVATLSC GHNVSVEELA QTRIYWQKEK KMVLTMMSGD
MNIWPEYKNR TIFDITNNLS IVILALRPSD EGTYECVVLK
YEKDAFKREH LAEVTLSVKA DFPTPSISDF EIPTSNIRRI
ICSTSGGFPE PHLSWLENGE ELNAINTTVS QXPETELYAV
SSKLDFNMTT NHSFMCLIKY GHLRVNQTFN WNTTKQEHFP DN,

where X is any amino acid other than Asp. In some cases, X is Ala;

(SEQ ID NO: 62)
VIHVTK EVKEVATLSC GHNVSVEEXA QTRIYWQKEK KMVLTMMSGD
MNIWPEYKNR TIFDITNNLS IVILALRPSD EGTYECVVLK
YEKDAFKREH LAEVTLSVKA DFPTPSISDF EIPTSNIRRI
ICSTSGGFPE PHLSWLENGE ELNAINTTVS QDPETELYAV
SSKLDFNMTT NHSFMCLIKY GHLRVNQTFN WNTTKQEHFP DN,

where X is any amino acid other than Leu. In some cases, X is Ala;

(SEQ ID NO: 63)
VIHVTK EVKEVATLSC GHNVSVEELA QTRIXWQKEK KMVLTMMSGD
MNIWPEYKNR TIFDITNNLS IVILALRPSD EGTYECVVLK
YEKDAFKREH LAEVTLSVKA DFPTPSISDF EIPTSNIRRI
ICSTSGGFPE PHLSWLENGE ELNAINTTVS QDPETELYAV
SSKLDFNMTT NHSFMCLIKY GHLRVNQTFN WNTTKQEHFP DN,

where X is any amino acid other than Tyr. In some cases, X is Ala;

(SEQ ID NO: 64)
VIHVTK EVKEVATLSC GHNVSVEELA QTRIYWXKEK KMVLTMMSGD
MNIWPEYKNR TIFDITNNLS IVILALRPSD EGTYECVVLK
YEKDAFKREH LAEVTLSVKA DFPTPSISDF EIPTSNIRRI
ICSTSGGFPE PHLSWLENGE ELNAINTTVS QDPETELYAV
SSKLDFNMTT NHSFMCLIKY GHLRVNQTFN WNTTKQEHFP DN,

where X is any amino acid other than Gln. In some cases, X is Ala;

(SEQ ID NO: 65)
VIHVTK EVKEVATLSC GHNVSVEELA QTRIYWQKEK KXVLTMMSGD
MNIWPEYKNR TIFDITNNLS IVILALRPSD EGTYECVVLK
YEKDAFKREH LAEVTLSVKA DFPTPSISDF EIPTSNIRRI
ICSTSGGFPE PHLSWLENGE ELNAINTTVS QDPETELYAV
SSKLDFNMTT NHSFMCLIKY GHLRVNQTFN WNTTKQEHFP DN,

where X is any amino acid other than Met. In some cases, X is Ala;

(SEQ ID NO: 66)
VIHVTK EVKEVATLSC GHNVSVEELA QTRIYWQKEK KMXLTMMSGD
MNIWPEYKNR TIFDITNNLS IVILALRPSD EGTYECVVLK
YEKDAFKREH LAEVTLSVKA DFPTPSISDF EIPTSNIRRI
ICSTSGGFPE PHLSWLENGE ELNAINTTVS QDPETELYAV
SSKLDFNMTT NHSFMCLIKY GHLRVNQTFN WNTTKQEHFP DN,

where X is any amino acid other than Val. In some cases, X is Ala;

(SEQ ID NO: 67)
VIHVTK EVKEVATLSC GHNVSVEELA QTRIYWQKEK KMVLTMMSGD
MNXWPEYKNR TIFDITNNLS IVILALRPSD EGTYECVVLK
YEKDAFKREH LAEVTLSVKA DFPTPSISDF EIPTSNIRRI
ICSTSGGFPE PHLSWLENGE ELNAINTTVS QDPETELYAV
SSKLDFNMTT NHSFMCLIKY GHLRVNQTFN WNTTKQEHFP DN,

where X is any amino acid other than Ile. In some cases, X is Ala;

(SEQ ID NO: 68)
VIHVTK EVKEVATLSC GHNVSVEELA QTRIYWQKEK KMVLTMMSGD
MNIWPEXKNR TIFDITNNLS IVILALRPSD EGTYECVVLK
YEKDAFKREH LAEVTLSVKA DFPTPSISDF EIPTSNIRRI
ICSTSGGFPE PHLSWLENGE ELNAINTTVS QDPETELYAV
SSKLDFNMTT NHSFMCLIKY GHLRVNQTFN WNTTKQEHFP DN,

where X is any amino acid other than Tyr. In some cases, X is Ala;

(SEQ ID NO: 69)
VIHVTK EVKEVATLSC GHNVSVEELA QTRIYWQKEK KMVLTMMSGD
MNIWPEYKNR TIFXITNNLS IVILALRPSD EGTYECVVLK
YEKDAFKREH LAEVTLSVKA DFPTPSISDF EIPTSNIRRI
ICSTSGGFPE PHLSWLENGE ELNAINTTVS QDPETELYAV
SSKLDFNMTT NHSFMCLIKY GHLRVNQTFN WNTTKQEHFP DN,

where X is any amino acid other than Asp. In some cases, X is Ala;

(SEQ ID NO: 70)
VIHVTK EVKEVATLSC GHNVSVEELA QTRIYWQKEK KMVLTMMSGD
MNIWPEYKNR TIFDITNNLS IVILALRPSD EGTYECVVLK
YEKDAFKREH LAEVTLSVKA DXPTPSISDF EIPTSNIRRI
ICSTSGGFPE PHLSWLENGE ELNAINTTVS QDPETELYAV
SSKLDFNMTT NHSFMCLIKY GHLRVNQTFN WNTTKQEHFP DN,

where X is any amino acid other than Phe. In some cases, X is Ala;

(SEQ ID NO: 71)
VIHVTK EVKEVATLSC GHNVSVEELA QTRIYWQKEK KMVLTMMSGD
MNIWPEYKNR TIFDITNNLS IVILALRPSD EGTYECVVLK
YEKDAFKREH LAEVTLSVKA DFPTPSISDF EIPTSNIRRI
ICSTSGGFPE PHLSWLENGE ELNAINTTVX QDPETELYAV
SSKLDFNMTT NHSFMCLIKY GHLRVNQTFN WNTTKQEHFP DN,

where X is any amino acid other than Ser. In some cases, X is Ala; and

(SEQ ID NO: 72)
VIHVTK EVKEVATLSC GHNVSVEELA QTRIYWQKEK KMVLTMMSGD
MNIWPEYKNR TIFDITNNLS IVILALRPSD EGTYECVVLK
YEKDAFKREH LAEVTLSVKA DFPTXSISDF EIPTSNIRRI
ICSTSGGFPE PHLSWLENGE ELNAINTTVS QDPETELYAV
SSKLDFNMTT NHSFMCLIKY GHLRVNQTFN WNTTKQEHFP DN,

where X is any amino acid other than Pro. In some cases, X is Ala.

### CD86 Variants

[0258] In some cases, a variant immunomodulatory polypeptide present in a TMMP of the present disclosure is a variant CD86 polypeptide. Wild-type CD86 binds to CD28. In some cases, where a TMMP of the present disclosure comprises a variant CD86 polypeptide, a “cognate co-immunomodulatory polypeptide” is a CD28 polypeptide comprising the amino acid sequence of SEQ ID NO:5.

[0259] The amino acid sequence of the full ectodomain of a wild-type human CD86 can be as follows:

(SEQ ID NO: 8)
APLKIQAYFNETADLPCQFANSQNQSLSELVVFWQDQENLVLNEVYLGKE
KFDSVHSKYMNRTSFDSDSWTLRLHNLQIKDKGLYQCIIHHKKPTGMIRI
HQMNSELSVLANFSQPEIVPISNITENVYINLTCSSIHGYPEPKKMSVLL
RTKNSTIEYDGIMQKSQDNVTELYDVSISLSVSFPDVTSNMTIFCILETD
KTRLLSSPFSIELEDPQPPPDHIP.

[0260] The amino acid sequence of the IgV domain of a wild-type human CD86 can be as follows:

(SEQ ID NO: 9)
APLKIQAYFNETADLPCQFANSQNQSLSELVVFWQDQENLVLNEVYLGKE
KFDSVHSKYMNRTSFDSDSWTLRLHNLQIKDKGLYQCIIHHKKPTGMIRI
HQMNSELSVL.

[0261] In some cases, a variant CD86 polypeptide exhibits reduced binding affinity to CD28, compared to the binding affinity of a CD86 polypeptide comprising the amino acid sequence set forth in SEQ ID NO:8 or SEQ ID NO:9 for CD28. For example, in some cases, a variant CD86 polypeptide binds CD28 with a binding affinity that is at least 10%, at least 15%, at least 20%, at least 25%, at least 30%, at least 35%, at least 40%, at least 45%, at least 50% less, at least 55% less, at least 60% less, at least 65% less, at least 70% less, at least 75% less, at least 80% less, at least 85% less, at least 90% less, at least 95% less, or more than 95% less, than the binding affinity of a CD86 polypeptide comprising the amino acid sequence set forth in SEQ ID NO:8 or SEQ ID NO:9 for CD28 (e.g., a CD28 polypeptide comprising the amino acid sequence set forth in one of SEQ ID NO:5, 6, or 7).

[0262] In some cases, a variant CD86 polypeptide has a binding affinity to CD28 that is from 100 nM to 100 μM. As another example, in some cases, a variant CD86 polypeptide of the present disclosure has a binding affinity for CD28 (e.g., a CD28 polypeptide comprising the amino acid sequence set forth in one of SEQ ID NOs:5, 6, or 7) that is from about 100 nM to 150 nM, from about 150 nM to about 200 nM, from about 200 nM to about 250 nM, from about 250 nM to about 300 nM, from about 300 nM to about 350 nM, from about 350 nM to about 400 nM, from about 400 nM to about 500 nM, from about 500 nM to about 600 nM, from about 600 nM to about 700 nM, from about 700 nM to about 800 nM, from about 800 nM to about 900 nM, from about 900 nM to about 1 μM, to about 1 μM to about 5 μM, from about 5 μM to about 10 μM, from about 10 μM to about 15 μM, from about 15 μM to about 20 μM, from about 20 μM to about 25 μM, from about 25 μM to about 50 μM, from about 50 μM to about 75 μM, or from about 75 μM to about 100 μM.

[0263] In some cases, a variant CD86 polypeptide has a single amino acid substitution compared to the CD86 amino acid sequence set forth in SEQ ID NO:8. In some cases, a variant CD86 polypeptide has from 2 to 10 amino acid substitutions compared to the CD86 amino acid sequence set forth in SEQ ID NO:8. In some cases, a variant CD86 polypeptide has 2 amino acid substitutions compared to the CD86 amino acid sequence set forth in SEQ ID NO:8. In some cases, a variant CD86 polypeptide has 3 amino acid substitutions compared to the CD86 amino acid sequence set forth in SEQ ID NO:8. In some cases, a variant CD86 polypeptide has 4 amino acid substitutions compared to the CD86 amino acid sequence set forth in SEQ ID NO:8. In some cases, a variant CD86 polypeptide has 5 amino acid substitutions compared to the CD86 amino acid sequence set forth in SEQ ID NO:8. In some cases, a variant CD86 polypeptide has 6 amino acid substitutions compared to the CD86 amino acid sequence set forth in SEQ ID NO:8. In some cases, a variant CD86 polypeptide has 7 amino acid substitutions compared to the CD86 amino acid sequence set forth in SEQ ID NO:8. In some cases, a variant CD86 polypeptide has 8 amino acid substitutions compared to the CD86 amino acid sequence set forth in SEQ ID NO:8. In some cases, a variant CD86 polypeptide has 9 amino acid substitutions compared to the CD86 amino acid sequence set forth in SEQ ID NO:8. In some cases, a variant CD86 polypeptide has 10 amino acid substitutions compared to the CD86 amino acid sequence set forth in SEQ ID NO:8.

[0264] In some cases, a variant CD86 polypeptide has a single amino acid substitution compared to the CD86 amino acid sequence set forth in SEQ ID NO:9. In some cases, a variant CD86 polypeptide has from 2 to 10 amino acid substitutions compared to the CD86 amino acid sequence set forth in SEQ ID NO:9. In some cases, a variant CD86 polypeptide has 2 amino acid substitutions compared to the CD86 amino acid sequence set forth in SEQ ID NO:9. In some cases, a variant CD86 polypeptide has 3 amino acid substitutions compared to the CD86 amino acid sequence set forth in SEQ ID NO:9. In some cases, a variant CD86 polypeptide has 4 amino acid substitutions compared to the CD86 amino acid sequence set forth in SEQ ID NO:9. In some cases, a variant CD86 polypeptide has 5 amino acid substitutions compared to the CD86 amino acid sequence set forth in SEQ ID NO:9. In some cases, a variant CD86 polypeptide has 6 amino acid substitutions compared to the CD86 amino acid sequence set forth in SEQ ID NO:9. In some cases, a variant CD86 polypeptide has 7 amino acid substitutions compared to the CD86 amino acid sequence set forth in SEQ ID NO:9. In some cases, a variant CD86 polypeptide has 8 amino acid substitutions compared to the CD86 amino acid sequence set forth in SEQ ID NO:9. In some cases, a variant CD86 polypeptide has 9 amino acid substitutions compared to the CD86 amino acid sequence set forth in SEQ ID NO:9. In some cases, a variant CD86 polypeptide has 10 amino acid substitutions compared to the CD86 amino acid sequence set forth in SEQ ID NO:9.

[0265] Suitable CD86 variants include a polypeptide that comprises an amino acid sequence having at least 90%, at least 95%, at least 98%, at least 99%, or 100%, amino acid sequence identity to any one of the following amino acid sequences:

(SEQ ID NO: 73)
APLKIQAYFNETADLPCQFANSQNQSLSELVVFWQDQENLVLNEVYLGKE
KFDSVHSKYMXRTSFDSDSWTLRLHNLQIKDKGLYQCIIHHKKPTGMIRI
HQMNSELSVLANFSQPEIVPISNITENVYINLTCSSIHGYPEPKKMSVLL
RTKNSTIEYDGIMQKSQDNVTELYDVSISLSVSFPDVTSNMTIFCILETD
KTRLLSSPFSIELEDPQPPPDHIP,

where X is any amino acid other than Asn. In some cases, X is Ala;

(SEQ ID NO: 74)
APLKIQAYFNETADLPCQFANSQNQSLSELVVFWQDQENLVLNEVYLGKE
KFDSVHSKYMNRTSFXSDSWTLRLHNLQIKDKGLYQCIIHHKKPTGMIRI
HQMNSELSVLANFSQPEIVPISNITENVYINLTCSSIHGYPEPKKMSVLL
RTKNSTIEYDGIMQKSQDNVTELYDVSISLSVSFPDVTSNMTIFCILETD
KTRLLSSPFSIELEDPQPPPDHIP,

where X is any amino acid other than Asp. In some cases, X is Ala;

(SEQ ID NO: 75)
APLKQAYFNETADLPCQFANSQNQSLSELVVFWQDQENLVLNEVYLGKEK
FDSVHSKYMNRTSFDSDSXTLRLHNLQIKDKGLYQCIIHHKKPTGMIRIH
QMNSELSVLANFSQPEIVPISNITENVYINLTCSSIHGYPEPKKMSVLLR
TKNSTIEYDGIMQKSQDNVTELYDVSISLSVSFPDVTSNMTIFCILETDK
TRLLSSPFSIELEDPQPPPDHIP,

where X is any amino acid other than Trp. In some cases, X is Ala;

(SEQ ID NO: 76)
APLKIQAYFNETADLPCQFANSQNQSLSELVVFWQDQENLVLNEVYLGKE
KFDSVHSKYMNRTSFDSDSWTLRLHNLQIKDKGLYQCIIHXKKPTGMIRI
HQMNSELSVLANFSQPEIVPISNITENVYINLTCSSIHGYPEPKKMSVLL
RTKNSTIEYDGIMQKSQDNVTELYDVSISLSVSFPDVTSNMTIFCILETD
KTRLLSSPFSIELEDPQPPPDHIP,

where X is any amino acid other than His. In some cases, X is Ala;

(SEQ ID NO: 77)
APLKIQAYFNETADLPCQFANSQNQSLSELVVFWQDQENLVLNEVYLGKE
KFDSVHSKYMXRTSFDSDSWTLRLHNLQIKDKGLYQCIIHHKKPTGMIRI
HQMNSELSVL,

where X is any amino acid other than Asn. In some cases, X is Ala;

(SEQ ID NO: 78)
APLKIQAYFNETADLPCQFANSQNQSLSELVVFWQDQENLVLNEVYLGKE
KFDSVHSKYMNRTSFXSDSWTLRLHNLQIKDKGLYQCIIHHKKPTGMIRI
HQMNSELSVL,

where X is any amino acid other than Asp. In some cases, X is Ala;

(SEQ ID NO: 79)
APLKIQAYFNETADLPCQFANSQNQSLSELVVFWQDQENLVLNEVYLGKE
KFDSVHSKYMNRTSFDSDSXTLRLHNLQIKDKGLYQCIIHHKKPTGMIRI
HQMNSELSVL,

where X is any amino acid other than Trp. In some cases, X is Ala;

(SEQ ID NO: 80)
APLKIQAYFNETADLPCQFANSQNQSLSELVVFWQDQENLVLNEVYLGKE
KFDSVHSKYMNRTSFDSDSWTLRLHNLQIKDKGLYQCIIHXKKPTGMIRI
HQMNSELSVL,

where X is any amino acid other than His. In some cases, X is Ala;

(SEQ ID NO: 81)
APLKIQAYFNETADLPCQFANSQNQSLSELVVFWQDQENLXLNEVYLGKE
KFDSVHSKYMNRTSFDSDSWTLRLHNLQIKDKGLYQCIIHHKKPTGMIRI
HQMNSELSVLANFSQPEIVPISNITENVYINLTCSSIHGYPEPKKMSVLL
RTKNSTIEYDGIMQKSQDNVTELYDVSISLSVSFPDVTSNMTIFCILETD
KTRLLSSPFSIELEDPQPPPDHIP,

where X is any amino acid other than Val. In some cases, X is Ala;

(SEQ ID NO: 82)
APLKIQAYFNETADLPCQFANSQNQSLSELVVFWQDQENLXLNEVYLGKE
KFDSVHSKYMNRTSFDSDSWTLRLHNLQIKDKGLYQCIIHHKKPTGMIRI
HQMNSELSVL,

where X is any amino acid other than Val. In some cases, X is Ala;

(SEQ ID NO: 83)
APLKIQAYFNETADLPCQFANSQNQSLSELVVFWXDQENLVLNEVYLGKE
KFDSVHSKYMNRTSFDSDSWTLRLHNLQIKDKGLYQCIIHHKKPTGMIRI
HQMNSELSVLANFSQPEIVPISNITENVYINLTCSSIHGYPEPKKMSVLL
RTKNSTIEYDGIMQKSQDNVTELYDVSISLSVSFPDVTSNMTIFCILETD
KTRLLSSPFSIELEDPQPPPDHIP,

where X is any amino acid other than Gln. In some cases, X is Ala;

(SEQ ID NO: 84)
APLKIQAYFNETADLPCQFANSQNQSLSELVVFWXDQENLVLNEVYLGKE
KFDSVHSKYMNRTSFDSDSWTLRLHNLQIKDKGLYQCIIHHKKPTGMIRI
HQMNSELSVL,

where X is any amino acid other than Gln. In some cases, X is Ala;

(SEQ ID NO: 85)
APLKIQAYFNETADLPCQFANSQNQSLSELVVXWQDQENLVLNEVYLGKE
KFDSVHSKYMNRTSFDSDSWTLRLHNLQIKDKGLYQCIIHHKKPTGMIRI
HQMNSELSVLANFSQPEIVPISNITENVYINLTCSSIHGYPEPKKMSVLL
RTKNSTIEYDGIMQKSQDNVTELYDVSISLSVSFPDVTSNMTIFCILETD
KTRLLSSPFSIELEDPQPPPDHIP,

where X is any amino acid other than Phe. In some cases, X is Ala;

(SEQ ID NO: 86)
APLKIQAYFNETADLPCQFANSQNQSLSELVVXWQDQENLVLNEVYLGKE
KFDSVHSKYMNRTSFDSDSWTLRLHNLQIKDKGLYQCIIHHKKPTGMIRI
HQMNSELSVL,

where X is any amino acid other than Phe. In some cases, X is Ala;

(SEQ ID NO: 87)
APLKIQAYFNETADLPCQFANSQNQSLSELVVFWQDQENLVLNEVYLGKE
KFDSVHSKYMNRTSFDSDSWTXRLHNLQIKDKGLYQCIIHHKKPTGMIRI
HQMNSELSVLANFSQPEIVPISNITENVYINLTCSSIHGYPEPKKMSVLL
RTKNSTIEYDGIMQKSQDNVTELYDVSISLSVSFPDVTSNMTIFCILETD
KTRLLSSPFSIELEDPQPPPDHIP,

where X is any amino acid other than Leu. In some cases, X is Ala;

(SEQ ID NO: 88)
APLKIQAYFNETADLPCQFANSQNQSLSELVVFWQDQENLVLNEVYLGKE
KFDSVHSKYMNRTSFDSDSWTXRLHNLQIKDKGLYQCIIHHKKPTGMIRI
HQMNSELSVL,

where X is any amino acid other than Leu. In some cases, X is Ala;

(SEQ ID NO: 89)
APLKIQAYFNETADLPCQFANSQNQSLSELVVFWQDQENLVLNEVYLGKE
KFDSVHSKXMNRTSFDSDSWTLRLHNLQIKDKGLYQCIIHHKKPTGMIRI
HQMNSELSVLANFSQPEIVPISNITENVYINLTCS SIHGYPEPKKMSVL
LRTKNSTIEYDGIMQKSQDNVTELYDVSISLSVSFPDVTSNMTIFCILET
DKTRLLSSPFSIELEDPQPPPDHIP,

where X is any amino acid other than Tyr. In some cases, X is Ala;

(SEQ ID NO: 90)
APLKIQAYFNETADLPCQFANSQNQSLSELVVFWQDQENLVLNEVYLGKE
KFDSVHSKXMNRTSFDSDSWTLRLHNLQIKDKGLYQCIIHHKKPTGMIRI
HQMNSELSVL,

where X is any amino acid other than Tyr. In some cases, X is Ala;

(SEQ ID NO: 91)
APLKIQAYFNETADLPCQFANSQNQSLSELVVFWQDQENLVLNEVYLGKE
KFDSVHSKYMXRTSFDSDSWTLRLHNLQIKDKGLYQCIIHXKKPTGMIRI
HQMNSELSVLANFSQPEIVPISNITENVYINLTCSSIHGYPEPKKMSVLL
RTKNSTIEYDGIMQKSQDNVTELYDVSISLSVSFPDVTSNMTIFCILETD
KTRLLSSPFSIELEDPQPPPDHIP,

where the first X is any amino acid other than Asn and the second X is any amino acid other than His. In some cases, the first and the second X are both Ala;

(SEQ ID NO: 92)
APLKIQAYFNETADLPCQFANSQNQSLSELVVFWQDQENLVLNEVYLGKE
KFDSVHSKYMXRTSFDSDSWTLRLHNLQIKDKGLYQCIIHXKKPTGMIRI
HQMNSELSVL,

where the first X is any amino acid other than Asn and the second X is any amino acid other than His. In some cases, the first and the second X are both Ala;

(SEQ ID NO: 93)
APLKIQAYFNETADLPCQFANSQNQSLSELVVFWQDQENLVLNEVYLGKE
KFDSVHSKYMNRTSFX₁SDSWTLRLHNLQIKDKGLYQCIIHX₂KKPTGMI
RIHQMNSELSVLANFSQPEIVPISNITENVYINLTCSSIHGYPEPKKMSV
LLRTKNSTIEYDGIMQKSQDNVTELYDVSISLSVSFPDVTSNMTIFCILE
TDKTRLLSSPFSIELEDPQPPPDHIP,

where X₁ is any amino acid other than Asp, and X₂ is any amino acid other than His. In some cases, X₁ is Ala and X₂ is Ala;

[0266] APLKIQAYFNETADLPCQFANSQNQSLSELVVFWQDQENLVLNEVYLGKEKFDSVHSKYM NRTSFX₁SDSWTLRLHNLQIKDKGLYQCIIHX₂KKPTGMIRIHQMNSELSVL (SEQ ID NO:94), where the first X is any amino acid other than Asn and the second X is any amino acid other than His. In some cases, the first and the second X are both Ala;

(SEQ ID NO: 95)
APLKIQAYFNETADLPCQFANSQNQSLSELVVFWQDQENLVLNEVYLGKE
KFDSVHSKYMX₁RTSFX₂SDSWTLRLHNLQIKDKGLYQCIIHX₃KKPTGM
IRIHQMNSELSVLANFSQPEIVPISNITENVYINLTCSSIHGYPEPKKMS
VLLRTKNSTIEYDGIMQKSQDNVTELYDVSISLSVSFPDVTSNMTIFCIL
ETDKTRLLSSPFSIELEDPQPPPDHIP,

where X₁ is any amino acid other than Asn, X₂ is any amino acid other than Asp, and X₃ is any amino acid other than His. In some cases, X₁ is Ala, X₂ is Ala, and X₃ is Ala; and

(SEQ ID NO: 96)
APLKIQAYFNETADLPCQFANSQNQSLSELVVFWQDQENLVLNEVYLGKE
KFDSVHSKYMX₁RTSFX₂SDSWTLRLHNLQIKDKGLYQCIIHX₃KKPTGM
IRIHQMNSELSVL,

where X₁ is any amino acid other than Asn, X₂ is any amino acid other than Asp, and X₃ is any amino acid other than His. In some cases, X₁ is Ala, X₂ is Ala, and X₃ is Ala.

### 4-1BBL Variants

[0267] In some cases, a variant immunomodulatory polypeptide present in a TMMP of the present disclosure is a variant 4-1BBL polypeptide. Wild-type 4-1BBL binds to 4-1BB (CD137).

[0268] A wild-type 4-1BBL amino acid sequence can be as follows:

(SEQ ID NO: 10)
MEYASDASLD PEAPWPPAPR ARACRVLPWA LVAGLLLLLL
LAAACAVFLA CPWAVSGARA SPGSAASPRL REGPELSPDD
PAGLLDLRQG MFAQLVAQNV LLIDGPLSWY SDPGLAGVSL
TGGLSYKEDT KELVVAKAGV YYVFFQLELR RVVAGEGSGS
VSLALHLQPL RSAAGAAALA LTVDLPPASS EARNSAFGFQ
GRLLHLSAGQ RLGVHLHTEA RARHAWQLTQ GATVLGLFRV
TPEIPAGLPS PRSE.

[0269] In some cases, a variant 4-1BBL polypeptide is a variant of the tumor necrosis factor (TNF) homology domain (THD) of human 4-1BBL.

[0270] A wild-type amino acid sequence of the THD of human 4-1BBL can be, e.g., one of SEQ ID NOs:11-13, as follows:

(SEQ ID NO: 11)
PAGLLDLRQG MFAQLVAQNV LLIDGPLSWY SDPGLAGVSL
TGGLSYKEDT KELVVAKAGV YYVFFQLELR RVVAGEGSGS
VSLALHLQPL RSAAGAAALA LTVDLPPASS EARNSAFGFQ
GRLLHLSAGQ RLGVHLHTEA RARHAWQLTQ GATVLGLFRV
TPEIPAGLPS PRSE.
(SEQ ID NO: 12)
D PAGLLDLRQG MFAQLVAQNV LLIDGPLSWY SDPGLAGVSL
TGGLSYKEDT KELVVAKAGV YYVFFQLELR RVVAGEGSGS
VSLALHLQPL RSAAGAAALA LTVDLPPASS EARNSAFGFQ
GRLLHLSAGQ RLGVHLHTEA RARHAWQLTQ GATVLGLFRV
TPEIPAGLPS PRSE.
(SEQ ID NO: 13)
D PAGLLDLRQG MFAQLVAQNV LLIDGPLSWY SDPGLAGVSL
TGGLSYKEDT KELVVAKAGV YYVFFQLELR RVVAGEGSGS
VSLALHLQPL RSAAGAAALA LTVDLPPASS EARNSAFGFQ
GRLLHLSAGQ RLGVHLHTEA RARHAWQLTQ GATVLGLFRV
TPEIPA.

[0271] A wild-type 4-1BB amino acid sequence can be as follows:

(SEQ ID NO: 14)
MGNSCYNIVA TLLLVLNFER TRSLQDPCSN CPAGTFCDNN
RNQICSPCPP NSFSSAGGQR TCDICRQCKG VFRTRKECSS
TSNAECDCTP GFHCLGAGCS MCEQDCKQGQ ELTKKGCKDC
CFGTFNDQKR GICRPWTNCS LDGKSVLVNG TKERDVVCGP
SPADLSPGAS SVTPPAPARE PGHSPQIISF FLALTSTALL
FLLFFLTLRF SVVKRGRKKL LYIFKQPFMR PVQTTQEEDG
CSCRFPEEEE GGCEL.

In some cases, where a TMMP of the present disclosure comprises a variant 4-1BBL polypeptide, a “cognate co-immunomodulatory polypeptide” is a 4-1BB polypeptide comprising the amino acid sequence of SEQ ID NO:14.

[0272] In some cases, a variant 4-1BBL polypeptide exhibits reduced binding affinity to 4-1BB, compared to the binding affinity of a 4-1BBL polypeptide comprising the amino acid sequence set forth in one of SEQ ID NOs:10-13. For example, in some cases, a variant 4-1BBL polypeptide of the present disclosure binds 4-1BB with a binding affinity that is at least 10% less, at least 15% less, at least 20% less, at least 25%, at least 30% less, at least 35% less, at least 40% less, at least 45% less, at least 50% less, at least 55% less, at least 60% less, at least 65% less, at least 70% less, at least 75% less, at least 80% less, at least 85% less, at least 90% less, at least 95% less, or more than 95% less, than the binding affinity of a 4-1BBL polypeptide comprising the amino acid sequence set forth in one of SEQ ID NOs:10-13 for a 4-1BB polypeptide (e.g., a 4-1BB polypeptide comprising the amino acid sequence set forth in SEQ ID NO:14), when assayed under the same conditions.

[0273] In some cases, a variant 4-1BBL polypeptide has a binding affinity to 4-1BB that is from 100 nM to 100 μM. As another example, in some cases, a variant 4-1BBL polypeptide has a binding affinity for 4-1BB (e.g., a 4-1BB polypeptide comprising the amino acid sequence set forth in SEQ ID NO:14) that is from about 100 nM to 150 nM, from about 150 nM to about 200 nM, from about 200 nM to about 250 nM, from about 250 nM to about 300 nM, from about 300 nM to about 350 nM, from about 350 nM to about 400 nM, from about 400 nM to about 500 nM, from about 500 nM to about 600 nM, from about 600 nM to about 700 nM, from about 700 nM to about 800 nM, from about 800 nM to about 900 nM, from about 900 nM to about 1 μM, to about 1 μM to about 5 μM, from about 5 μM to about 10 μM, from about 10 μM to about 15 μM, from about 15 μM to about 20 μM, from about 20 μM to about 25 μM, from about 25 μM to about 50 μM, from about 50 μM to about 75 μM, or from about 75 μM to about 100 μM.

[0274] In some cases, a variant 4-1BBL polypeptide has a single amino acid substitution compared to the 4-1BBL amino acid sequence set forth in one of SEQ ID NOs:10-13. In some cases, a variant 4-1BBL polypeptide has from 2 to 10 amino acid substitutions compared to the 4-1BBL amino acid sequence set forth in one of SEQ ID NOs:10-13. In some cases, a variant 4-1BBL polypeptide has 2 amino acid substitutions compared to the 4-1BBL amino acid sequence set forth in one of SEQ ID NOs:10-13. In some cases, a variant 4-1BBL polypeptide has 3 amino acid substitutions compared to the 4-1BBL amino acid sequence set forth in one of SEQ ID NOs:10-13. In some cases, a variant 4-1BBL polypeptide has 4 amino acid substitutions compared to the 4-1BBL amino acid sequence set forth in one of SEQ ID NOs:10-13. In some cases, a variant 4-1BBL polypeptide has 5 amino acid substitutions compared to the 4-1BBL amino acid sequence set forth in one of SEQ ID NOs:10-13. In some cases, a variant 4-1BBL polypeptide has 6 amino acid substitutions compared to the 4-1BBL amino acid sequence set forth in one of SEQ ID NOs:10-13. In some cases, a variant 4-1BBL polypeptide has 7 amino acid substitutions compared to the 4-1BBL amino acid sequence set forth in one of SEQ ID NOs:10-13. In some cases, a variant 4-1BBL polypeptide has 8 amino acid substitutions compared to the 4-1BBL amino acid sequence set forth in one of SEQ ID NOs:10-13. In some cases, a variant 4-1BBL polypeptide has 9 amino acid substitutions compared to the 4-1BBL amino acid sequence set forth in one of SEQ ID NOs:10-13. In some cases, a variant 4-1BBL polypeptide has 10 amino acid substitutions compared to the 4-1BBL amino acid sequence set forth in one of SEQ ID NOs:10-13.

[0275] Suitable 4-1BBL variants include a polypeptide that comprises an amino acid sequence having at least 90%, at least 95%, at least 98%, at least 99%, or 100%, amino acid sequence identity to any one of the following amino acid sequences:

(SEQ ID NO: 97)
PAGLLDLRQG MFAQLVAQNV LLIDGPLSWY SDPGLAGVSL
TGGLSYXEDT KELVVAKAGV YYVFFQLELR RVVAGEGSGS
VSLALHLQPL RSAAGAAALA LTVDLPPASS EARNSAFGFQ
GRLLHLSAGQ RLGVHLHTEA RARHAWQLTQ GATVLGLFRV
TPEIPAGLPS PRSE,

where X is any amino acid other than Lys. In some cases, X is Ala;

(SEQ ID NO: 98)
PAGLLDLRQG MFAQLVAQNV LLIDGPLSWY SDPGLAGVSL
TGGLSYKEDT KELVVAKAGV YYVFFQLELR RVVAGEGSGS
VSLALHLQPL RSAAGAAALA LTVDLPPASS EARNSAFGFQ
GRLLHLSAGQ RLGVHLHTEA RARHAWXLTQ GATVLGLFRV
TPEIPAGLPS PRSE,

where X is any amino acid other than Gln. In some cases, X is Ala;

(SEQ ID NO: 99)
PAGLLDLRQG XFAQLVAQNV LLIDGPLSWY SDPGLAGVSL
TGGLSYKEDT KELVVAKAGV YYVFFQLELR RVVAGEGSGS
VSLALHLQPL RSAAGAAALA LTVDLPPASS EARNSAFGFQ
GRLLHLSAGQ RLGVHLHTEA RARHAWQLTQ GATVLGLFRV
TPEIPAGLPS PRSE,

where X is any amino acid other than Met. In some cases, X is Ala;

(SEQ ID NO: 100)
PAGLLDLRQG MXAQLVAQNV LLIDGPLSWY SDPGLAGVSL
TGGLSYKEDT KELVVAKAGV YYVFFQLELR RVVAGEGSGS
VSLALHLQPL RSAAGAAALA LTVDLPPASS EARNSAFGFQ
GRLLHLSAGQ RLGVHLHTEA RARHAWQLTQ GATVLGLFRV
TPEIPAGLPS PRSE,

where X is any amino acid other than Phe. In some cases, X is Ala;

(SEQ ID NO: 101)
PAGLLDLRQG MFAXLVAQNV LLIDGPLSWY SDPGLAGVSL
TGGLSYKEDT KELVVAKAGV YYVFFQLELR RVVAGEGSGS
VSLALHLQPL RSAAGAAALA LTVDLPPASS EARNSAFGFQ
GRLLHLSAGQ RLGVHLHTEA RARHAWQLTQ GATVLGLFRV
TPEIPAGLPS PRSE,

where X is any amino acid other than Gln. In some cases, X is Ala;

(SEQ ID NO: 102)
PAGLLDLRQG MFAQXVAQNV LLIDGPLSWY SDPGLAGVSL
TGGLSYKEDT KELVVAKAGV YYVFFQLELR RVVAGEGSGS
VSLALHLQPL RSAAGAAALA LTVDLPPASS EARNSAFGFQ
GRLLHLSAGQ RLGVHLHTEA RARHAWQLTQ GATVLGLFRV
TPEIPAGLPS PRSE,

where X is any amino acid other than Leu. In some cases, X is Ala;

(SEQ ID NO: 103)
PAGLLDLRQG MFAQLXAQNV LLIDGPLSWY SDPGLAGVSL
TGGLSYKEDT KELVVAKAGV YYVFFQLELR RVVAGEGSGS
VSLALHLQPL RSAAGAAALA LTVDLPPASS EARNSAFGFQ
GRLLHLSAGQ RLGVHLHTEA RARHAWQLTQ GATVLGLFRV
TPEIPAGLPS PRSE,

where X is any amino acid other than Val. In some cases, X is Ala;

(SEQ ID NO: 104)
PAGLLDLRQG MFAQLVAXNV LLIDGPLSWY SDPGLAGVSL
TGGLSYKEDT KELVVAKAGV YYVFFQLELR RVVAGEGSGS
VSLALHLQPL RSAAGAAALA LTVDLPPASS EARNSAFGFQ
GRLLHLSAGQ RLGVHLHTEA RARHAWQLTQ GATVLGLFRV
TPEIPAGLPS PRSE,

where X is any amino acid other than Gln. In some cases, X is Ala;

(SEQ ID NO: 105)
PAGLLDLRQG MFAQLVAQXV LLIDGPLSWY SDPGLAGVSL
TGGLSYKEDT KELVVAKAGV YYVFFQLELR RVVAGEGSGS
VSLALHLQPL RSAAGAAALA LTVDLPPASS EARNSAFGFQ
GRLLHLSAGQ RLGVHLHTEA RARHAWQLTQ GATVLGLFRV
TPEIPAGLPS PRSE,

where X is any amino acid other than Asn. In some cases, X is Ala;

(SEQ ID NO: 106)
PAGLLDLRQG MFAQLVAQNX LLIDGPLSWY SDPGLAGVSL
TGGLSYKEDT KELVVAKAGV YYVFFQLELR RVVAGEGSGS
VSLALHLQPL RSAAGAAALA LTVDLPPASS EARNSAFGFQ
GRLLHLSAGQ RLGVHLHTEA RARHAWQLTQ GATVLGLFRV
TPEIPAGLPS PRSE,

where X is any amino acid other than Val. In some cases, X is Ala;

(SEQ ID NO: 107)
PAGLLDLRQG MFAQLVAQNV XLIDGPLSWY SDPGLAGVSL
TGGLSYKEDT KELVVAKAGV YYVFFQLELR RVVAGEGSGS
VSLALHLQPL RSAAGAAALA LTVDLPPASS EARNSAFGFQ
GRLLHLSAGQ RLGVHLHTEA RARHAWQLTQ GATVLGLFRV
TPEIPAGLPS PRSE,

where X is any amino acid other than Leu. In some cases, X is Ala;

(SEQ ID NO: 108)
PAGLLDLRQG MFAQLVAQNV LXIDGPLSWY SDPGLAGVSL
TGGLSYKEDT KELVVAKAGV YYVFFQLELR RVVAGEGSGS
VSLALHLQPL RSAAGAAALA LTVDLPPASS EARNSAFGFQ
GRLLHLSAGQ RLGVHLHTEA RARHAWQLTQ GATVLGLFRV
TPEIPAGLPS PRSE,

where X is any amino acid other than Leu. In some cases, X is Ala;

(SEQ ID NO: 109)
PAGLLDLRQG MFAQLVAQNV LLXDGPLSWY SDPGLAGVSL
TGGLSYKEDT KELVVAKAGV YYVFFQLELR RVVAGEGSGS
VSLALHLQPL RSAAGAAALA LTVDLPPASS EARNSAFGFQ
GRLLHLSAGQ RLGVHLHTEA RARHAWQLTQ GATVLGLFRV
TPEIPAGLPS PRSE,

where X is any amino acid other than Ile. In some cases, X is Ala;

(SEQ ID NO: 110)
PAGLLDLRQG MFAQLVAQNV LLIXGPLSWY SDPGLAGVSL
TGGLSYKEDT KELVVAKAGV YYVFFQLELR RVVAGEGSGS
VSLALHLQPL RSAAGAAALA LTVDLPPASS EARNSAFGFQ
GRLLHLSAGQ RLGVHLHTEA RARHAWQLTQ GATVLGLFRV
TPEIPAGLPS PRSE,

where X is any amino acid other than Asp. In some cases, X is Ala;

(SEQ ID NO: 111)
PAGLLDLRQG MFAQLVAQNV LLIDXPLSWY SDPGLAGVSL
TGGLSYKEDT KELVVAKAGV YYVFFQLELR RVVAGEGSGS
VSLALHLQPL RSAAGAAALA LTVDLPPASS EARNSAFGFQ
GRLLHLSAGQ RLGVHLHTEA RARHAWQLTQ GATVLGLFRV
TPEIPAGLPS PRSE,

where X is any amino acid other than Gly. In some cases, X is Ala;

(SEQ ID NO: 112)
PAGLLDLRQG MFAQLVAQNV LLIGGXLSWY SDPGLAGVSL
TGGLSYKEDT KELVVAKAGV YYVFFQLELR RVVAGEGSGS
VSLALHLQPL RSAAGAAALA LTVDLPPASS EARNSAFGFQ
GRLLHLSAGQ RLGVHLHTEA RARHAWQLTQ GATVLGLFRV
TPEIPAGLPS PRSE,

where X is any amino acid other than Pro. In some cases, X is Ala;

(SEQ ID NO: 113)
PAGLLDLRQG MFAQLVAQNV LLIGGPXSWY SDPGLAGVSL
TGGLSYKEDT KELVVAKAGV YYVFFQLELR RVVAGEGSGS
VSLALHLQPL RSAAGAAALA LTVDLPPASS EARNSAFGFQ
GRLLHLSAGQ RLGVHLHTEA RARHAWQLTQ GATVLGLFRV
TPEIPAGLPS PRSE,

where X is any amino acid other than Leu. In some cases, X is Ala;

(SEQ ID NO: 114)
PAGLLDLRQG MFAQLVAQNV LLIGGPLXWY SDPGLAGVSL
TGGLSYKEDT KELVVAKAGV YYVFFQLELR RVVAGEGSGS
VSLALHLQPL RSAAGAAALA LTVDLPPASS EARNSAFGFQ
GRLLHLSAGQ RLGVHLHTEA RARHAWQLTQ GATVLGLFRV
TPEIPAGLPS PRSE,

where X is any amino acid other than Ser. In some cases, X is Ala;

(SEQ ID NO: 115)
PAGLLDLRQG MFAQLVAQNV LLIGGPLSXY SDPGLAGVSL
TGGLSYKEDT KELVVAKAGV YYVFFQLELR RVVAGEGSGS
VSLALHLQPL RSAAGAAALA LTVDLPPASS EARNSAFGFQ
GRLLHLSAGQ RLGVHLHTEA RARHAWQLTQ GATVLGLFRV
TPEIPAGLPS PRSE,

where X is any amino acid other than Trp. In some cases, X is Ala;

(SEQ ID NO: 116)
PAGLLDLRQG MFAQLVAQNV LLIGGPLSWX SDPGLAGVSL
TGGLSYKEDT KELVVAKAGV YYVFFQLELR RVVAGEGSGS
VSLALHLQPL RSAAGAAALA LTVDLPPASS EARNSAFGFQ
GRLLHLSAGQ RLGVHLHTEA RARHAWQLTQ GATVLGLFRV
TPEIPAGLPS PRSE,

where X is any amino acid other than Tyr. In some cases, X is Ala;

(SEQ ID NO: 117)
PAGLLDLRQG MFAQLVAQNV LLIGGPLSWY XDPGLAGVSL
TGGLSYKEDT KELVVAKAGV YYVFFQLELR RVVAGEGSGS
VSLALHLQPL RSAAGAAALA LTVDLPPASS EARNSAFGFQ
GRLLHLSAGQ RLGVHLHTEA RARHAWQLTQ GATVLGLFRV
TPEIPAGLPS PRSE,

where X is any amino acid other than Ser. In some cases, X is Ala;

(SEQ ID NO: 118)
PAGLLDLRQG MFAQLVAQNV LLIGGPLSWY SXPGLAGVSL
TGGLSYKEDT KELVVAKAGV YYVFFQLELR RVVAGEGSGS
VSLALHLQPL RSAAGAAALA LTVDLPPASS EARNSAFGFQ
GRLLHLSAGQ RLGVHLHTEA RARHAWQLTQ GATVLGLFRV
TPEIPAGLPS PRSE,

where X is any amino acid other than Asp. In some cases, X is Ala;

(SEQ ID NO: 119)
PAGLLDLRQG MFAQLVAQNV LLIGGPLSWY SDXGLAGVSL
TGGLSYKEDT KELVVAKAGV YYVFFQLELR RVVAGEGSGS
VSLALHLQPL RSAAGAAALA LTVDLPPASS EARNSAFGFQ
GRLLHLSAGQ RLGVHLHTEA RARHAWQLTQ GATVLGLFRV
TPEIPAGLPS PRSE,

where X is any amino acid other than Pro. In some cases, X is Ala;

(SEQ ID NO: 120)
PAGLLDLRQG MFAQLVAQNV LLIGGPLSWY SDPXLAGVSL
TGGLSYKEDT KELVVAKAGV YYVFFQLELR RVVAGEGSGS
VSLALHLQPL RSAAGAAALA LTVDLPPASS EARNSAFGFQ
GRLLHLSAGQ RLGVHLHTEA RARHAWQLTQ GATVLGLFRV
TPEIPAGLPS PRSE,

where X is any amino acid other than Gly. In some cases, X is Ala;

(SEQ ID NO: 121)
PAGLLDLRQG MFAQLVAQNV LLIGGPLSWY SDPGXAGVSL
TGGLSYKEDT KELVVAKAGV YYVFFQLELR RVVAGEGSGS
VSLALHLQPL RSAAGAAALA LTVDLPPASS EARNSAFGFQ
GRLLHLSAGQ RLGVHLHTEA RARHAWQLTQ GATVLGLFRV
TPEIPAGLPS PRSE,

where X is any amino acid other than Leu. In some cases, X is Ala;

(SEQ ID NO: 122)
PAGLLDLRQG MFAQLVAQNV LLIGGPLSWY SDPGLAXVSL
TGGLSYKEDT KELVVAKAGV YYVFFQLELR RVVAGEGSGS
VSLALHLQPL RSAAGAAALA LTVDLPPASS EARNSAFGFQ
GRLLHLSAGQ RLGVHLHTEA RARHAWQLTQ GATVLGLFRV
TPEIPAGLPS PRSE,

where X is any amino acid other than Gly. In some cases, X is Ala;

(SEQ ID NO: 123)
PAGLLDLRQG MFAQLVAQNV LLIGGPLSWY SDPGLAGXSL
TGGLSYKEDT KELVVAKAGV YYVFFQLELR RVVAGEGSGS
VSLALHLQPL RSAAGAAALA LTVDLPPASS EARNSAFGFQ
GRLLHLSAGQ RLGVHLHTEA RARHAWQLTQ GATVLGLFRV
TPEIPAGLPS PRSE,

where X is any amino acid other than Val. In some cases, X is Ala;

(SEQ ID NO: 124)
PAGLLDLRQG MFAQLVAQNV LLIGGPLSWY SDPGLAGVXL
TGGLSYKEDT KELVVAKAGV YYVFFQLELR RVVAGEGSGS
VSLALHLQPL RSAAGAAALA LTVDLPPASS EARNSAFGFQ
GRLLHLSAGQ RLGVHLHTEA RARHAWQLTQ GATVLGLFRV
TPEIPAGLPS PRSE,

where X is any amino acid other than Ser. In some cases, X is Ala;

(SEQ ID NO: 125)
PAGLLDLRQG MFAQLVAQNV LLIGGPLSWY SDPGLAGVSX
TGGLSYKEDT KELVVAKAGV YYVFFQLELR RVVAGEGSGS
VSLALHLQPL RSAAGAAALA LTVDLPPASS EARNSAFGFQ
GRLLHLSAGQ RLGVHLHTEA RARHAWQLTQ GATVLGLFRV
TPEIPAGLPS PRSE,

where X is any amino acid other than Leu. In some cases, X is Ala;

(SEQ ID NO: 126)
PAGLLDLRQG MFAQLVAQNV LLIGGPLSWY SDPGLAGVSL
XGGLSYKEDT KELVVAKAGV YYVFFQLELR RVVAGEGSGS
VSLALHLQPL RSAAGAAALA LTVDLPPASS EARNSAFGFQ
GRLLHLSAGQ RLGVHLHTEA RARHAWQLTQ GATVLGLFRV
TPEIPAGLPS PRSE,

where X is any amino acid other than Thr. In some cases, X is Ala;

(SEQ ID NO: 127)
PAGLLDLRQG MFAQLVAQNV LLIGGPLSWY SDPGLAGVSL
TXGLSYKEDT KELVVAKAGV YYVFFQLELR RVVAGEGSGS
VSLALHLQPL RSAAGAAALA LTVDLPPASS EARNSAFGFQ
GRLLHLSAGQ RLGVHLHTEA RARHAWQLTQ GATVLGLFRV
TPEIPAGLPS PRSE,

where X is any amino acid other than Gly. In some cases, X is Ala;

(SEQ ID NO: 128)
PAGLLDLRQG MFAQLVAQNV LLIGGPLSWY SDPGLAGVSL
TGXLSYKEDT KELVVAKAGV YYVFFQLELR RVVAGEGSGS
VSLALHLQPL RSAAGAAALA LTVDLPPASS EARNSAFGFQ
GRLLHLSAGQ RLGVHLHTEA RARHAWQLTQ GATVLGLFRV
TPEIPAGLPS PRSE,

where X is any amino acid other than Gly. In some cases, X is Ala;

(SEQ ID NO: 129)
PAGLLDLRQG MFAQLVAQNV LLIGGPLSWY SDPGLAGVSL
TGGXSYKEDT KELVVAKAGV YYVFFQLELR RVVAGEGSGS
VSLALHLQPL RSAAGAAALA LTVDLPPASS EARNSAFGFQ
GRLLHLSAGQ RLGVHLHTEA RARHAWQLTQ GATVLGLFRV
TPEIPAGLPS PRSE,

where X is any amino acid other than Leu. In some cases, X is Ala;

(SEQ ID NO: 130)
PAGLLDLRQG MFAQLVAQNV LLIGGPLSWY SDPGLAGVSL
TGGLXYKEDT KELVVAKAGV YYVFFQLELR RVVAGEGSGS
VSLALHLQPL RSAAGAAALA LTVDLPPASS EARNSAFGFQ
GRLLHLSAGQ RLGVHLHTEA RARHAWQLTQ GATVLGLFRV
TPEIPAGLPS PRSE,

where X is any amino acid other than Ser. In some cases, X is Ala;

(SEQ ID NO: 131)
PAGLLDLRQG MFAQLVAQNV LLIGGPLSWY SDPGLAGVSL
TGGLSXKEDT KELVVAKAGV YYVFFQLELR RVVAGEGSGS
VSLALHLQPL RSAAGAAALA LTVDLPPASS EARNSAFGFQ
GRLLHLSAGQ RLGVHLHTEA RARHAWQLTQ GATVLGLFRV
TPEIPAGLPS PRSE,

where X is any amino acid other than Tyr. In some cases, X is Ala;

(SEQ ID NO: 132)
PAGLLDLRQG MFAQLVAQNV LLIGGPLSWY SDPGLAGVSL
TGGLSYKXDT KELVVAKAGV YYVFFQLELR RVVAGEGSGS
VSLALHLQPL RSAAGAAALA LTVDLPPASS EARNSAFGFQ
GRLLHLSAGQ RLGVHLHTEA RARHAWQLTQ GATVLGLFRV
TPEIPAGLPS PRSE,

where X is any amino acid other than Glu. In some cases, X is Ala;

(SEQ ID NO: 133)
PAGLLDLRQG MFAQLVAQNV LLIGGPLSWY SDPGLAGVSL
TGGLSYKEXT KELVVAKAGV YYVFFQLELR RVVAGEGSGS
VSLALHLQPL RSAAGAAALA LTVDLPPASS EARNSAFGFQ
GRLLHLSAGQ RLGVHLHTEA RARHAWQLTQ GATVLGLFRV
TPEIPAGLPS PRSE,

where X is any amino acid other than Asp. In some cases, X is Ala;

(SEQ ID NO: 134)
PAGLLDLRQG MFAQLVAQNV LLIGGPLSWY SDPGLAGVSL
TGGLSYKEDX KELVVAKAGV YYVFFQLELR RVVAGEGSGS
VSLALHLQPL RSAAGAAALA LTVDLPPASS EARNSAFGFQ
GRLLHLSAGQ RLGVHLHTEA RARHAWQLTQ GATVLGLFRV
TPEIPAGLPS PRSE,

where X is any amino acid other than Thr. In some cases, X is Ala;

(SEQ ID NO: 135)
PAGLLDLRQG MFAQLVAQNV LLIGGPLSWY SDPGLAGVSL
TGGLSYKEDT XELVVAKAGV YYVFFQLELR RVVAGEGSGS
VSLALHLQPL RSAAGAAALA LTVDLPPASS EARNSAFGFQ
GRLLHLSAGQ RLGVHLHTEA RARHAWQLTQ GATVLGLFRV
TPEIPAGLPS PRSE,

where X is any amino acid other than Lys. In some cases, X is Ala;

(SEQ ID NO: 136)
PAGLLDLRQG MFAQLVAQNV LLIGGPLSWY SDPGLAGVSL
TGGLSYKEDT KXLVVAKAGV YYVFFQLELR RVVAGEGSGS
VSLALHLQPL RSAAGAAALA LTVDLPPASS EARNSAFGFQ
GRLLHLSAGQ RLGVHLHTEA RARHAWQLTQ GATVLGLFRV
TPEIPAGLPS PRSE,

where X is any amino acid other than Glu. In some cases, X is Ala;

(SEQ ID NO: 137)
PAGLLDLRQG MFAQLVAQNV LLIGGPLSWY SDPGLAGVSL
TGGLSYKEDT KELVVAKAGV YYVXFQLELR RVVAGEGSGS
VSLALHLQPL RSAAGAAALA LTVDLPPASS EARNSAFGFQ
GRLLHLSAGQ RLGVHLHTEA RARHAWQLTQ GATVLGLFRV
TPEIPAGLPS PRSE,

where X is any amino acid other than Phe. In some cases, X is Ala;

(SEQ ID NO: 138)
PAGLLDLRQG MFAQLVAQNV LLIGGPLSWY SDPGLAGVSL
TGGLSYKEDT KELVVAKAGV YYVFXQLELR RVVAGEGSGS
VSLALHLQPL RSAAGAAALA LTVDLPPASS EARNSAFGFQ
GRLLHLSAGQ RLGVHLHTEA RARHAWQLTQ GATVLGLFRV
TPEIPAGLPS PRSE,

where X is any amino acid other than Phe. In some cases, X is Ala;

(SEQ ID NO: 139)
PAGLLDLRQG MFAQLVAQNV LLIGGPLSWY SDPGLAGVSL
TGGLSYKEDT KELVVAKAGV YYVFFXLELR RVVAGEGSGS
VSLALHLQPL RSAAGAAALA LTVDLPPASS EARNSAFGFQ
GRLLHLSAGQ RLGVHLHTEA RARHAWQLTQ GATVLGLFRV
TPEIPAGLPS PRSE,

where X is any amino acid other than Gln. In some cases, X is Ala;

(SEQ ID NO: 140)
PAGLLDLRQG MFAQLVAQNV LLIGGPLSWY SDPGLAGVSL
TGGLSYKEDT KELVVAKAGV YYVFFQXELR RVVAGEGSGS
VSLALHLQPL RSAAGAAALA LTVDLPPASS EARNSAFGFQ
GRLLHLSAGQ RLGVHLHTEA RARHAWQLTQ GATVLGLFRV
TPEIPAGLPS PRSE,

where X is any amino acid other than Leu. In some cases, X is Ala;

(SEQ ID NO: 141)
PAGLLDLRQG MFAQLVAQNV LLIGGPLSWY SDPGLAGVSL
TGGLSYKEDT KELVVAKAGV YYVFFQLXLR RVVAGEGSGS
VSLALHLQPL RSAAGAAALA LTVDLPPASS EARNSAFGFQ
GRLLHLSAGQ RLGVHLHTEA RARHAWQLTQ GATVLGLFRV
TPEIPAGLPS PRSE,

where X is any amino acid other than Glu. In some cases, X is Ala;

(SEQ ID NO: 142)
PAGLLDLRQG MFAQLVAQNV LLIGGPLSWY SDPGLAGVSL
TGGLSYKEDT KELVVAKAGV YYVFFQLEXR RVVAGEGSGS
VSLALHLQPL RSAAGAAALA LTVDLPPASS EARNSAFGFQ
GRLLHLSAGQ RLGVHLHTEA RARHAWQLTQ GATVLGLFRV
TPEIPAGLPS PRSE,

where X is any amino acid other than Leu. In some cases, X is Ala;

(SEQ ID NO: 143)
PAGLLDLRQG MFAQLVAQNV LLIGGPLSWY SDPGLAGVSL
TGGLSYKEDT KELVVAKAGV YYVFFQLELX RVVAGEGSGS
VSLALHLQPL RSAAGAAALA LTVDLPPASS EARNSAFGFQ
GRLLHLSAGQ RLGVHLHTEA RARHAWQLTQ GATVLGLFRV
TPEIPAGLPS PRSE,

where X is any amino acid other than Arg. In some cases, X is Ala;

(SEQ ID NO: 144)
PAGLLDLRQG MFAQLVAQNV LLIGGPLSWY SDPGLAGVSL
TGGLSYKEDT KELVVAKAGV YYVFFQLELR XVVAGEGSGS
VSLALHLQPL RSAAGAAALA LTVDLPPASS EARNSAFGFQ
GRLLHLSAGQ RLGVHLHTEA RARHAWQLTQ GATVLGLFRV
TPEIPAGLPS PRSE,

where X is any amino acid other than Arg. In some cases, X is Ala;

(SEQ ID NO: 145)
PAGLLDLRQG MFAQLVAQNV LLIGGPLSWY SDPGLAGVSL
TGGLSYKEDT KELVVAKAGV YYVFFQLELR RXVAGEGSGS
VSLALHLQPL RSAAGAAALA LTVDLPPASS EARNSAFGFQ
GRLLHLSAGQ RLGVHLHTEA RARHAWQLTQ GATVLGLFRV
TPEIPAGLPS PRSE,

where X is any amino acid other than Val. In some cases, X is Ala;

(SEQ ID NO: 146)
PAGLLDLRQG MFAQLVAQNV LLIGGPLSWY SDPGLAGVSL
TGGLSYKEDT KELVVAKAGV YYVFFQLELR RVXAGEGSGS
VSLALHLQPL RSAAGAAALA LTVDLPPASS EARNSAFGFQ
GRLLHLSAGQ RLGVHLHTEA RARHAWQLTQ GATVLGLFRV
TPEIPAGLPS PRSE,

where X is any amino acid other than Val. In some cases, X is Ala;

(SEQ ID NO: 147)
PAGLLDLRQG MFAQLVAQNV LLIGGPLSWY SDPGLAGVSL
TGGLSYKEDT KELVVAKAGV YYVFFQLELR RVVAXEGSGS
VSLALHLQPL RSAAGAAALA LTVDLPPASS EARNSAFGFQ
GRLLHLSAGQ RLGVHLHTEA RARHAWQLTQ GATVLGLFRV
TPEIPAGLPS PRSE,

where X is any amino acid other than Gly. In some cases, X is Ala;

(SEQ ID NO: 148)
PAGLLDLRQG MFAQLVAQNV LLIGGPLSWY SDPGLAGVSL
TGGLSYKEDT KELVVAKAGV YYVFFQLELR RVVAGXGSGS
VSLALHLQPL RSAAGAAALA LTVDLPPASS EARNSAFGFQ
GRLLHLSAGQ RLGVHLHTEA RARHAWQLTQ GATVLGLFRV
TPEIPAGLPS PRSE,

where X is any amino acid other than Glu. In some cases, X is Ala;

(SEQ ID NO: 149)
PAGLLDLRQG MFAQLVAQNV LLIGGPLSWY SDPGLAGVSL
TGGLSYKEDT KELVVAKAGV YYVFFQLELR RVVAGEXSGS
VSLALHLQPL RSAAGAAALA LTVDLPPASS EARNSAFGFQ
GRLLHLSAGQ RLGVHLHTEA RARHAWQLTQ GATVLGLFRV
TPEIPAGLPS PRSE,

where X is any amino acid other than Gly. In some cases, X is Ala;

(SEQ ID NO: 150)
PAGLLDLRQG MFAQLVAQNV LLIGGPLSWY SDPGLAGVSL
TGGLSYKEDT KELVVAKAGV YYVFFQLELR RVVAGEGXGS
VSLALHLQPL RSAAGAAALA LTVDLPPASS EARNSAFGFQ
GRLLHLSAGQ RLGVHLHTEA RARHAWQLTQ GATVLGLFRV
TPEIPAGLPS PRSE,

where X is any amino acid other than Ser. In some cases, X is Ala;

(SEQ ID NO: 151)
PAGLLDLRQG MFAQLVAQNV LLIGGPLSWY SDPGLAGVSL
TGGLSYKEDT KELVVAKAGV YYVFFQLELR RVVAGEGSGS
VSLALHLQPL RSAAGAAALA LTVXLPPASS EARNSAFGFQ
GRLLHLSAGQ RLGVHLHTEA RARHAWQLTQ GATVLGLFRV
TPEIPAGLPS PRSE,

where X is any amino acid other than Asp. In some cases, X is Ala;

(SEQ ID NO: 152)
PAGLLDLRQG MFAQLVAQNV LLIGGPLSWY SDPGLAGVSL
TGGLSYKEDT KELVVAKAGV YYVFFQLELR RVVAGEGSGS
VSLALHLQPL RSAAGAAALA LTVDXPPASS EARNSAFGFQ
GRLLHLSAGQ RLGVHLHTEA RARHAWQLTQ GATVLGLFRV
TPEIPAGLPS PRSE,

where X is any amino acid other than Leu. In some cases, X is Ala;

(SEQ ID NO: 153)
PAGLLDLRQG MFAQLVAQNV LLIGGPLSWY SDPGLAGVSL
TGGLSYKEDT KELVVAKAGV YYVFFQLELR RVVAGEGSGS
VSLALHLQPL RSAAGAAALA LTVDLXPASS EARNSAFGFQ
GRLLHLSAGQ RLGVHLHTEA RARHAWQLTQ GATVLGLFRV
TPEIPAGLPS PRSE,

where X is any amino acid other than Pro. In some cases, X is Ala;

(SEQ ID NO: 154)
PAGLLDLRQG MFAQLVAQNV LLIGGPLSWY SDPGLAGVSL
TGGLSYKEDT KELVVAKAGV YYVFFQLELR RVVAGEGSGS
VSLALHLQPL RSAAGAAALA LTVDLPPAXS EARNSAFGFQ
GRLLHLSAGQ RLGVHLHTEA RARHAWQLTQ GATVLGLFRV
TPEIPAGLPS PRSE,

where X is any amino acid other than Ser. In some cases, X is Ala;

(SEQ ID NO: 155)
PAGLLDLRQG MFAQLVAQNV LLIGGPLSWY SDPGLAGVSL
TGGLSYKEDT KELVVAKAGV YYVFFQLELR RVVAGEGSGS
VSLALHLQPL RSAAGAAALA LTVDLPPASX EARNSAFGFQ
GRLLHLSAGQ RLGVHLHTEA RARHAWQLTQ GATVLGLFRV
TPEIPAGLPS PRSE,

where X is any amino acid other than Ser. In some cases, X is Ala;

(SEQ ID NO: 156)
PAGLLDLRQG MFAQLVAQNV LLIGGPLSWY SDPGLAGVSL
TGGLSYKEDT KELVVAKAGV YYVFFQLELR RVVAGEGSGS
VSLALHLQPL RSAAGAAALA LTVDLPPASS XARNSAFGFQ
GRLLHLSAGQ RLGVHLHTEA RARHAWQLTQ GATVLGLFRV
TPEIPAGLPS PRSE,

where X is any amino acid other than Glu. In some cases, X is Ala;

(SEQ ID NO: 157)
PAGLLDLRQG MFAQLVAQNV LLIGGPLSWY SDPGLAGVSL
TGGLSYKEDT KELVVAKAGV YYVFFQLELR RVVAGEGSGS
VSLALHLQPL RSAAGAAALA LTVDLPPASS EAXNSAFGFQ
GRLLHLSAGQ RLGVHLHTEA RARHAWQLTQ GATVLGLFRV
TPEIPAGLPS PRSE,

where X is any amino acid other than Arg. In some cases, X is Ala;

(SEQ ID NO: 158)
PAGLLDLRQG MFAQLVAQNV LLIGGPLSWY SDPGLAGVSL
TGGLSYKEDT KELVVAKAGV YYVFFQLELR RVVAGEGSGS
VSLALHLQPL RSAAGAAALA LTVDLPPASS EARXSAFGFQ
GRLLHLSAGQ RLGVHLHTEA RARHAWQLTQ GATVLGLFRV
TPEIPAGLPS PRSE,

where X is any amino acid other than Asn. In some cases, X is Ala;

(SEQ ID NO: 159)
PAGLLDLRQG MFAQLVAQNV LLIGGPLSWY SDPGLAGVSL
TGGLSYKEDT KELVVAKAGV YYVFFQLELR RVVAGEGSGS
VSLALHLQPL RSAAGAAALA LTVDLPPASS EARNXAFGFQ
GRLLHLSAGQ RLGVHLHTEA RARHAWQLTQ GATVLGLFRV
TPEIPAGLPS PRSE,

where X is any amino acid other than Ser. In some cases, X is Ala;

(SEQ ID NO: 160)
PAGLLDLRQG MFAQLVAQNV LLIGGPLSWY SDPGLAGVSL
TGGLSYKEDT KELVVAKAGV YYVFFQLELR RVVAGEGSGS
VSLALHLQPL RSAAGAAALA LTVDLPPASS EARNSAXGFQ
GRLLHLSAGQ RLGVHLHTEA RARHAWQLTQ GATVLGLFRV
TPEIPAGLPS PRSE,

where X is any amino acid other than Phe. In some cases, X is Ala;

(SEQ ID NO: 161)
PAGLLDLRQG MFAQLVAQNV LLIGGPLSWY SDPGLAGVSL
TGGLSYKEDT KELVVAKAGV YYVFFQLELR RVVAGEGSGS
VSLALHLQPL RSAAGAAALA LTVDLPPASS EARNSAFGFQ
GRLLHLSAGX RLGVHLHTEA RARHAWQLTQ GATVLGLFRV
TPEIPAGLPS PRSE,

where X is any amino acid other than Gln. In some cases, X is Ala;

(SEQ ID NO: 162)
PAGLLDLRQG MFAQLVAQNV LLIGGPLSWY SDPGLAGVSL
TGGLSYKEDT KELVVAKAGV YYVFFQLELR RVVAGEGSGS
VSLALHLQPL RSAAGAAALA LTVDLPPASS EARNSAFGFQ
GRLLHLSAGQ XLGVHLHTEA RARHAWQLTQ GATVLGLFRV
TPEIPAGLPS PRSE,

where X is any amino acid other than Arg. In some cases, X is Ala;

(SEQ ID NO: 163)
PAGLLDLRQG MFAQLVAQNV LLIGGPLSWY SDPGLAGVSL
TGGLSYKEDT KELVVAKAGV YYVFFQLELR RVVAGEGSGS
VSLALHLQPL RSAAGAAALA LTVDLPPASS EARNSAFGFQ
GRLLHLSAGQ RXGVHLHTEA RARHAWQLTQ GATVLGLFRV
TPEIPAGLPS PRSE,

where X is any amino acid other than Leu. In some cases, X is Ala;

(SEQ ID NO: 164)
PAGLLDLRQG MFAQLVAQNV LLIGGPLSWY SDPGLAGVSL
TGGLSYKEDT KELVVAKAGV YYVFFQLELR RVVAGEGSGS
VSLALHLQPL RSAAGAAALA LTVDLPPASS EARNSAFGFQ
GRLLHLSAGQ RLXVHLHTEA RARHAWQLTQ GATVLGLFRV
TPEIPAGLPS PRSE,

where X is any amino acid other than Gly. In some cases, X is Ala;

(SEQ ID NO: 165)
PAGLLDLRQG MFAQLVAQNV LLIGGPLSWY SDPGLAGVSL
TGGLSYKEDT KELVVAKAGV YYVFFQLELR RVVAGEGSGS
VSLALHLQPL RSAAGAAALA LTVDLPPASS EARNSAFGFQ
GRLLHLSAGQ RLGXHLHTEA RARHAWQLTQ GATVLGLFRV
TPEIPAGLPS PRSE,

where X is any amino acid other than Val. In some cases, X is Ala;

(SEQ ID NO: 166)
PAGLLDLRQG MFAQLVAQNV LLIGGPLSWY SDPGLAGVSL
TGGLSYKEDT KELVVAKAGV YYVFFQLELR RVVAGEGSGS
VSLALHLQPL RSAAGAAALA LTVDLPPASS EARNSAFGFQ
GRLLHLSAGQ RLGVXLHTEA RARHAWQLTQ GATVLGLFRV
TPEIPAGLPS PRSE,

where X is any amino acid other than His. In some cases, X is Ala;

(SEQ ID NO: 167)
PAGLLDLRQG MFAQLVAQNV LLIGGPLSWY SDPGLAGVSL
TGGLSYKEDT KELVVAKAGV YYVFFQLELR RVVAGEGSGS
VSLALHLQPL RSAAGAAALA LTVDLPPASS EARNSAFGFQ
GRLLHLSAGQ RLGVHXHTEA RARHAWQLTQ GATVLGLFRV
TPEIPAGLPS PRSE,

where X is any amino acid other than Leu. In some cases, X is Ala;

(SEQ ID NO: 168)
PAGLLDLRQG MFAQLVAQNV LLIGGPLSWY SDPGLAGVSL
TGGLSYKEDT KELVVAKAGV YYVFFQLELR RVVAGEGSGS
VSLALHLQPL RSAAGAAALA LTVDLPPASS EARNSAFGFQ
GRLLHLSAGQ RLGVHLXTEA RARHAWQLTQ GATVLGLFRV
TPEIPAGLPS PRSE,

where X is any amino acid other than His. In some cases, X is Ala;

(SEQ ID NO: 169)
PAGLLDLRQG MFAQLVAQNV LLIGGPLSWY SDPGLAGVSL
TGGLSYKEDT KELVVAKAGV YYVFFQLELR RVVAGEGSGS
VSLALHLQPL RSAAGAAALA LTVDLPPASS EARNSAFGFQ
GRLLHLSAGQ RLGVHLHXEA RARHAWQLTQ GATVLGLFRV
TPEIPAGLPS PRSE,

where X is any amino acid other than Thr. In some cases, X is Ala;

(SEQ ID NO: 170)
PAGLLDLRQG MFAQLVAQNV LLIGGPLSWY SDPGLAGVSL
TGGLSYKEDT KELVVAKAGV YYVFFQLELR RVVAGEGSGS
VSLALHLQPL RSAAGAAALA LTVDLPPASS EARNSAFGFQ
GRLLHLSAGQ RLGVHLHTXA RARHAWQLTQ GATVLGLFRV
TPEIPAGLPS PRSE,

where X is any amino acid other than Glu. In some cases, X is Ala;

(SEQ ID NO: 171)
PAGLLDLRQG MFAQLVAQNV LLIGGPLSWY SDPGLAGVSL
TGGLSYKEDT KELVVAKAGV YYVFFQLELR RVVAGEGSGS
VSLALHLQPL RSAAGAAALA LTVDLPPASS EARNSAFGFQ
GRLLHLSAGQ RLGVHLHTEA XARHAWQLTQ GATVLGLFRV
TPEIPAGLPS PRSE,

where X is any amino acid other than Arg. In some cases, X is Ala;

(SEQ ID NO: 172)
PAGLLDLRQG MFAQLVAQNV LLIGGPLSWY SDPGLAGVSL
TGGLSYKEDT KELVVAKAGV YYVFFQLELR RVVAGEGSGS
VSLALHLQPL RSAAGAAALA LTVDLPPASS EARNSAFGFQ
GRLLHLSAGQ RLGVHLHTEA RAXHAWQLTQ GATVLGLFRV
TPEIPAGLPS PRSE,

where X is any amino acid other than Arg. In some cases, X is Ala;

(SEQ ID NO: 173)
PAGLLDLRQG MFAQLVAQNV LLIGGPLSWY SDPGLAGVSL
TGGLSYKEDT KELVVAKAGV YYVFFQLELR RVVAGEGSGS
VSLALHLQPL RSAAGAAALA LTVDLPPASS EARNSAFGFQ
GRLLHLSAGQ RLGVHLHTEA RARXAWQLTQ GATVLGLFRV
TPEIPAGLPS PRSE,

where X is any amino acid other than His. In some cases, X is Ala;

(SEQ ID NO: 174)
PAGLLDLRQG MFAQLVAQNV LLIGGPLSWY SDPGLAGVSL
TGGLSYKEDT KELVVAKAGV YYVFFQLELR RVVAGEGSGS
VSLALHLQPL RSAAGAAALA LTVDLPPASS EARNSAFGFQ
GRLLHLSAGQ RLGVHLHTEA RARHAXQLTQ GATVLGLFRV
TPEIPAGLPS PRSE,

where X is any amino acid other than Trp. In some cases, X is Ala;

(SEQ ID NO: 175)
PAGLLDLRQG MFAQLVAQNV LLIGGPLSWY SDPGLAGVSL
TGGLSYKEDT KELVVAKAGV YYVFFQLELR RVVAGEGSGS
VSLALHLQPL RSAAGAAALA LTVDLPPASS EARNSAFGFQ
GRLLHLSAGQ RLGVHLHTEA RARHAWQXTQ GATVLGLFRV
TPEIPAGLPS PRSE,

where X is any amino acid other than Leu. In some cases, X is Ala;

(SEQ ID NO: 176)
PAGLLDLRQG MFAQLVAQNV LLIGGPLSWY SDPGLAGVSL
TGGLSYKEDT KELVVAKAGV YYVFFQLELR RVVAGEGSGS
VSLALHLQPL RSAAGAAALA LTVDLPPASS EARNSAFGFQ
GRLLHLSAGQ RLGVHLHTEA RARHAWQLXQ GATVLGLFRV
TPEIPAGLPS PRSE,

where X is any amino acid other than Thr. In some cases, X is Ala;

(SEQ ID NO: 177)
PAGLLDLRQG MFAQLVAQNV LLIGGPLSWY SDPGLAGVSL
TGGLSYKEDT KELVVAKAGV YYVFFQLELR RVVAGEGSGS
VSLALHLQPL RSAAGAAALA LTVDLPPASS EARNSAFGFQ
GRLLHLSAGQ RLGVHLHTEA RARHAWQLTX GATVLGLFRV
TPEIPAGLPS PRSE,

where X is any amino acid other than Gln. In some cases, X is Ala;

(SEQ ID NO: 178)
PAGLLDLRQG MFAQLVAQNV LLIGGPLSWY SDPGLAGVSL
TGGLSYKEDT KELVVAKAGV YYVFFQLELR RVVAGEGSGS
VSLALHLQPL RSAAGAAALA LTVDLPPASS EARNSAFGFQ
GRLLHLSAGQ RLGVHLHTEA RARHAWQLTQ XATVLGLFRV
TPEIPAGLPS PRSE,

where X is any amino acid other than Gly. In some cases, X is Ala;

(SEQ ID NO: 179)
PAGLLDLRQG MFAQLVAQNV LLIGGPLSWY SDPGLAGVSL
TGGLSYKEDT KELVVAKAGV YYVFFQLELR RVVAGEGSGS
VSLALHLQPL RSAAGAAALA LTVDLPPASS EARNSAFGFQ
GRLLHLSAGQ RLGVHLHTEA RARHAWQLTQ GAXVLGLFRV
TPEIPAGLPS PRSE,

where X is any amino acid other than Thr. In some cases, X is Ala; and

(SEQ ID NO: 180)
PAGLLDLRQG MFAQLVAQNV LLIGGPLSWY SDPGLAGVSL
TGGLSYKEDT KELVVAKAGV YYVFFQLELR RVVAGEGSGS
VSLALHLQPL RSAAGAAALA LTVDLPPASS EARNSAFGFQ
GRLLHLSAGQ RLGVHLHTEA RARHAWQLTQ GATXLGLFRV
TPEIPAGLPS PRSE,

where X is any amino acid other than Val. In some cases, X is Ala.

### IL-2 Variants

[0276] In some cases, a variant immunomodulatory polypeptide present in a TMMP of the present disclosure is a variant IL-2 polypeptide. Wild-type IL-2 binds to IL-2 receptor (IL-2R), i.e., a heterotrimeric polypeptide comprising IL-2Rα, IL-2Rβ, and IL-2Rγ.

[0277] A wild-type IL-2 amino acid sequence can be as follows:

(SEQ ID NO: 15)
APTSSSTKKT QLQLEHLLLD LQMILNGINN YKNPKLTRML
TFKFYMPKKA TELKHLQCLEEELKPLEEVL NLAQSKNFHL
RPRDLISNIN VIVLELKGSE TTFMCEYADE
TATIVEFLNRWITFCQSIIS TLT.

[0278] Wild-type IL2 binds to an IL2 receptor (IL2R) on the surface of a cell. An IL2 receptor is in some cases a heterotrimeric polypeptide comprising an alpha chain (IL-2Rα; also referred to as CD25), a beta chain (IL-2Rβ; also referred to as CD122: and a gamma chain (IL-2Rγ; also referred to as CD132). Amino acid sequences of human IL-2Rα, IL2Rβ, and IL-2Rγ can be as follows.

Human IL-2Rα:
(SEQ ID NO: 16)
ELCDDDPPE IPHATFKAMA YKEGTMLNCE CKRGFRRIKS
GSLYMLCTGN SSHSSWDNQC QCTSSATRNT TKQVTPQPEE
QKERKTTEMQ SPMQPVDQAS LPGHCREPPP WENEATERIY
HFVVGQMVYY QCVQGYRALH RGPAESVCKM THGKTRWTQP
QLICTGEMET SQFPGEEKPQ ASPEGRPESE TSCLVTTTDF
QIQTEMAATM ETSIFTTEYQ VAVAGCVFLL ISVLLLSGLT
WQRRQRKSRR TI.
Human IL-2Rβ:
(SEQ ID NO: 17)
VNG TSQFTCFYNS RANISCVWSQ DGALQDTSCQ VHAWPDRRRW
NQTCELLPVS QASWACNLIL GAPDSQKLTT VDIVTLRVLC
REGVRWRVMA IQDFKPFENL RLMAPISLQV VHVETHRCNI
SWEISQASHY FERHLEFEAR TLSPGHTWEE APLLTLKQKQ
EWICLETLTP DTQYEFQVRV KPLQGEFTTW SPWSQPLAFR
TKPAALGKDT IPWLGHLLVG LSGAFGFIIL VYLLINCRNT
GPWLKKVLKC NTPDPSKFFS QLSSEHGGDV QKWLSSPFPS
SSFSPGGLAP EISPLEVLER DKVTQLLLQQ DKVPEPASLS
SNHSLTSCFT NQGYFFFHLP DALEIEACQV YFTYDPYSEE
DPDEGVAGAP TGSSPQPLQP LSGEDDAYCT FPSRDDLLLF
SPSLLGGPSP PSTAPGGSGA GEERMPPSLQ ERVPRDWDPQ
PLGPPTPGVP DLVDFQPPPE LVLREAGEEV PDAGPREGVS
FPWSRPPGQG EFRALNARLP LNTDAYLSLQ ELQGQDPTHL V.
Human IL-2Rγ:
(SEQ ID NO: 18)
LNTTILTP NGNEDTTADF FLTTMPTDSL SVSTLPLPEV
QCFVFNVEYM NCTWNSSSEP QPTNLTLHYW YKNSDNDKVQ
KCSHYLFSEE ITSGCQLQKK EIHLYQTFVV QLQDPREPRR
QATQMLKLQN LVIPWAPENL TLHKLSESQL ELNWNNRFLN
HCLEHLVQYR TDWDHSWTEQ SVDYRHKFSL PSVDGQKRYT
FRVRSRFNPL CGSAQHWSEW SHPIHWGSNT SKENPFLFAL
EAVVISVGSM GLIISLLCVY FWLERTMPRI PTLKNLEDLV
TEYHGNFSAW SGVSKGLAES LQPDYSERLC LVSEIPPKGG
ALGEGPGASP CNQHSPYWAP PCYTLKPET.

[0279] In some cases, where a TMMP of the present disclosure comprises a variant IL-2 polypeptide, a “cognate co-immunomodulatory polypeptide” is an IL-2R comprising polypeptides comprising the amino acid sequences of SEQ ID NO:16, 17, and 18.

[0280] In some cases, a variant IL-2 polypeptide exhibits reduced binding affinity to IL-2R, compared to the binding affinity of a IL-2 polypeptide comprising the amino acid sequence set forth in SEQ ID NO:15. For example, in some cases, a variant IL-2 polypeptide binds IL-2R with a binding affinity that is at least 10% less, at least 15% less, at least 20% less, at least 25%, at least 30% less, at least 35% less, at least 40% less, at least 45% less, at least 50% less, at least 55% less, at least 60% less, at least 65% less, at least 70% less, at least 75% less, at least 80% less, at least 85% less, at least 90% less, at least 95% less, or more than 95% less, than the binding affinity of an IL-2 polypeptide comprising the amino acid sequence set forth in SEQ ID NO:15 for an IL-2R (e.g., an IL-2R comprising polypeptides comprising the amino acid sequence set forth in SEQ ID NOs:16-18), when assayed under the same conditions.

[0281] In some cases, a variant IL-2 polypeptide has a binding affinity to IL-2R that is from 100 nM to 100 μM. As another example, in some cases, a variant IL-2 polypeptide has a binding affinity for IL-2R (e.g., an IL-2R comprising polypeptides comprising the amino acid sequence set forth in SEQ ID NOs:16-18) that is from about 100 nM to 150 nM, from about 150 nM to about 200 nM, from about 200 nM to about 250 nM, from about 250 nM to about 300 nM, from about 300 nM to about 350 nM, from about 350 nM to about 400 nM, from about 400 nM to about 500 nM, from about 500 nM to about 600 nM, from about 600 nM to about 700 nM, from about 700 nM to about 800 nM, from about 800 nM to about 900 nM, from about 900 nM to about 1 μM, to about 1 μM to about 5 μM, from about 5 μM to about 10 μM, from about 10 μM to about 15 μM, from about 15 μM to about 20 μM, from about 20 μM to about 25 μM, from about 25 μM to about 50 μM, from about 50 μM to about 75 μM, or from about 75 μM to about 100 μM.

[0282] In some cases, a variant IL-2 polypeptide has a single amino acid substitution compared to the IL-2 amino acid sequence set forth in SEQ ID NO:15. In some cases, a variant IL-2 polypeptide has from 2 to 10 amino acid substitutions compared to the IL-2 amino acid sequence set forth in SEQ ID NO:15. In some cases, a variant IL-2 polypeptide has 2 amino acid substitutions compared to the IL-2 amino acid sequence set forth in SEQ ID NO:15. In some cases, a variant IL-2 polypeptide has 3 amino acid substitutions compared to the IL-2 amino acid sequence set forth in SEQ ID NO:15. In some cases, a variant IL-2 polypeptide has 4 amino acid substitutions compared to the IL-2 amino acid sequence set forth in SEQ ID NO:15. In some cases, a variant IL-2 polypeptide has 5 amino acid substitutions compared to the IL-2 amino acid sequence set forth in SEQ ID NO:15. In some cases, a variant IL-2 polypeptide has 6 amino acid substitutions compared to the IL-2 amino acid sequence set forth in SEQ ID NO:15. In some cases, a variant IL-2 polypeptide has 7 amino acid substitutions compared to the IL-2 amino acid sequence set forth in SEQ ID NO:15. In some cases, a variant IL-2 polypeptide has 8 amino acid substitutions compared to the IL-2 amino acid sequence set forth in SEQ ID NO:15. In some cases, a variant IL-2 polypeptide has 9 amino acid substitutions compared to the IL-2 amino acid sequence set forth in SEQ ID NO:15. In some cases, a variant IL-2 polypeptide has 10 amino acid substitutions compared to the IL-2 amino acid sequence set forth in SEQ ID NO:15.

[0283] Suitable IL-2 variants include a polypeptide that comprises an amino acid sequence having at least 90%, at least 95%, at least 98%, at least 99%, or 100%, amino acid sequence identity to any one of the following amino acid sequences:

(SEQ ID NO: 181)
APTSSSTKKT QLQLEHLLLD LQMILNGINN YKNPKLTRML
TXKFYMPKKA TELKHLQCLE EELKPLEEVL NLAQSKNFHL
RPRDLISNIN VIVLELKGSE TTFMCEYADE TATIVEFLNR
WITFCQSIIS TLT,

where X is any amino acid other than Phe. In some cases, X is Ala. In some cases, X is Met. In some cases, X is Pro. In some cases, X is Ser. In some cases, X is Thr. In some cases, X is Trp. In some cases, X is Tyr. In some cases, X is Val. In some cases, X is His;

(SEQ ID NO: 182)
APTSSSTKKT QLQLEHLLLX LQMILNGINN YKNPKLTRML
TFKFYMPKKA TELKHLQCLE EELKPLEEVL NLAQSKNFHL
RPRDLISNIN VIVLELKGSE TTFMCEYADE TATIVEFLNR
WITFCQSIIS TLT,

where X is any amino acid other than Asp. In some cases, X is Ala;

(SEQ ID NO: 183)
APTSSSTKKT QLQLXHLLLD LQMILNGINN YKNPKLTRML
TFKFYMPKKA TELKHLQCLE EELKPLEEVL NLAQSKNFHL
RPRDLISNIN VIVLELKGSE TTFMCEYADE TATIVEFLNR
WITFCQSIIS TLT,

where X is any amino acid other than Glu. In some cases, X is Ala.

(SEQ ID NO: 184)
APTSSSTKKT QLQLEXLLLD LQMILNGINN YKNPKLTRML
TFKFYMPKKA TELKHLQCLE EELKPLEEVL NLAQSKNFHL
RPRDLISNIN VIVLELKGSE TTFMCEYADE TATIVEFLNR
WITFCQSIIS TLT,

where X is any amino acid other than His. In some cases, X is Ala. In some cases, X is Thr. In some cases, X is Asn. In some cases, X is Cys. In some cases, X is Gln. In some cases, X is Met. In some cases, X is Val. In some cases, X is Trp;

(SEQ ID NO: 185)
APTSSSTKKT QLQLEXLLLD LQMILNGINN YKNPKLTRML
TFKFYMPKKA TELKHLQCLE EELKPLEEVL NLAQSKNFHL
RPRDLISNIN VIVLELKGSE TTFMCEYADE TATIVEFLNR
WITFCQSIIS TLT,

where X is any amino acid other than His. In some cases, X is Ala. In some cases, X is Arg. In some cases, X is Asn. In some cases, X is Asp. In some cases, X is Cys. In some cases, X is Glu. In some cases, X is Gln. In some cases, X is Gly. In some cases, X is Ile. I n some cases, X is Lys. In some cases, X is Leu. In some cases, X is Met. In some cases, X is Phe. In some cases, X is Pro. In some cases, X is Ser. In some cases, X is Thr. In some cases, X is Tyr. In some cases, X is Trp. In some cases, X is Val;

(SEQ ID NO: 186)
APTSSSTKKT QLQLEHLLLD LQMILNGINN YKNPKLTRML
TFKFXMPKKA TELKHLQCLE EELKPLEEVL NLAQSKNFHL
RPRDLISNIN VIVLELKGSE TTFMCEYADE TATIVEFLNR
WITFCQSIIS TLT,

where X is any amino acid other than Tyr. In some cases, X is Ala;

(SEQ ID NO: 187)
APTSSSTKKT QLQLEHLLLD LQMILNGINN YKNPKLTRML
TFKFYMPKKA TELKHLQCLE EELKPLEEVL NLAQSKNFHL
RPRDLISNIN VIVLELKGSE TTFMCEYADE TATIVEFLNR
WITFCXSIIS TLT,

where X is any amino acid other than Gln. In some cases, X is Ala;

(SEQ ID NO: 188)
APTSSSTKKT QLQLEX₁LLLD LQMILNGINN YKNPKLTRML
TX₂KFYMPKKA TELKHLQCLE EELKPLEEVL NLAQSKNFHL
RPRDLISNIN VIVLELKGSE TTFMCEYADE TATIVEFLNR
WITFCQSIIS TLT,

where X₁ is any amino acid other than His, and where X₂ is any amino acid other than Phe. In some cases, X₁ is Ala. In some cases, X₂ is Ala. In some cases, X₁ is Ala; and X₂ is Ala. In some cases, X₁ is Thr; and X₂ is Ala;

(SEQ ID NO: 189)
APTSSSTKKT QLQLEHLLLX₁ LQMILNGINN YKNPKLTRML
TX₂KFYMPKKA TELKHLQCLE EELKPLEEVL NLAQSKNFHL
RPRDLISNIN VIVLELKGSE TTFMCEYADE TATIVEFLNR
WITFCQSIIS TLT,

where X₁ is any amino acid other than Asp; and where X₂ is any amino acid other than Phe. In some cases, X₁ is Ala. In some cases, X₂ is Ala. In some cases. X, is Ala: and X₂ is Ala:

(SEQ ID NO: 190)
APTSSSTKKT QLQLX₁HLLLX₂ LQMILNGINN YKNPKLTRML
TX₃KFYMPKKA TELKHLQCLE EELKPLEEVL NLAQSKNFHL
RPRDLISNIN VIVLELKGSE TTFMCEYADE TATIVEFLNR
WITFCQSIIS TLT,

where X₁ is any amino acid other than Glu; where X₂ is any amino acid other than Asp; and where X₃ is any amino acid other than Phe. In some cases, X₁ is Ala. In some cases, X₂ is Ala. In some cases, X₃ is Ala. In some cases, X₁ is Ala; X₂ is Ala; and X₃ is Ala;

(SEQ ID NO: 191)
APTSSSTKKT QLQLEX₁LLLX₂ LQMILNGINN YKNPKLTRML
TX₃KFYMPKKA TELKHLQCLE EELKPLEEVL NLAQSKNFHL
RPRDLISNIN VIVLELKGSE TTFMCEYADE TATIVEFLNR
WITFCQSIIS TLT,

where X₁ is any amino acid other than His; where X₂ is any amino acid other than Asp; and where X₃ is any amino acid other than Phe. In some cases, X₁ is Ala. In some cases, X₂ is Ala. In some cases, X₃ is Ala. In some cases, X₁ is Ala; X₂ is Ala; and X₃ is Ala;

(SEQ ID NO: 192)
APTSSSTKKT QLQLEHLLLX₁ LQMILNGINN YKNPKLTRML
TX₂KFYMPKKA TELKHLQCLE EELKPLEEVL NLAQSKNFHL
RPRDLISNIN VIVLELKGSE TTFMCEYADE TATIVEFLNR
WITFCX₃SIIS TLT,

where X₁ is any amino acid other than Asp; where X₂ is any amino acid other than Phe; and where X₃ is any amino acid other than Gln. In some cases, X₁ is Ala. In some cases, X₂ is Ala. In some cases, X₃ is Ala. In some cases, X₁ is Ala; X₂ is Ala; and X₃ is Ala;

(SEQ ID NO: 193)
APTSSSTKKT QLQLEHLLLX₁ LQMILNGINN YKNPKLTRML
TX₂KFX₃MPKKA TELKHLQCLE EELKPLEEVL NLAQSKNFHL
RPRDLISNIN VIVLELKGSE TTFMCEYADE TATIVEFLNR
WITFCQSIIS TLT,

where X₁ is any amino acid other than Asp; where X₂ is any amino acid other than Phe; and where X₃ is any amino acid other than Tyr. In some cases, X₁ is Ala. In some cases, X₂ is Ala. In some cases, X₃ is Ala. In some cases, X₁ is Ala; X₂ is Ala; and X₃ is Ala;

(SEQ ID NO: 194)
APTSSSTKKT QLQLEX₁LLLX₂ LQMILNGINN YKNPKLTRML
TX₃KFX₄MPKKA TELKHLQCLE EELKPLEEVL NLAQSKNFHL
RPRDLISNIN VIVLELKGSE TTFMCEYADE TATIVEFLNR
WITFCQSIIS TLT,

where X₁ is any amino acid other than His; where X₂ is any amino acid other than Asp; where X₃ is any amino acid other than Phe; and where X₄ is any amino acid other than Tyr. In some cases, X₁ is Ala. In some cases, X₂ is Ala. In some cases, X₃ is Ala. In some cases, X₄ is Ala. In some cases, X₁ is Ala; X₂ is Ala; X₃ is Ala; and X₄ is Ala;

(SEQ ID NO: 195)
APTSSSTKKT QLQLEHLLLX₁ LQMILNGINN YKNPKLTRML
TX₂KFX₃MPKKA TELKHLQCLE EELKPLEEVL NLAQSKNFHL
RPRDLISNIN VIVLELKGSE TTFMCEYADE TATIVEFLNR
WITFCX₄SIIS TLT,

where X₁ is any amino acid other than Asp; where X₂ is any amino acid other than Phe; where X₃ is any amino acid other than Tyr; and where X₄ is any amino acid other than Gln. In some cases, X₁ is Ala. In some cases, X₂ is Ala. In some cases, X₃ is Ala. In some cases, X₄ is Ala. In some cases, X₁ is Ala; X₂ is Ala; X₃ is Ala; and X₄ is Ala;

(SEQ ID NO: 196)
APTSSSTKKT QLQLEX₁LLLX₂ LQMILNGINN YKNPKLTRML
TX₃KFX₄MPKKA TELKHLQCLE EELKPLEEVL NLAQSKNFHL
RPRDLISNIN VIVLELKGSE TTFMCEYADE TATIVEFLNR
WITFCX₅SIIS TLT,

where X₁ is any amino acid other than His; where X₂ is any amino acid other than Asp; where X₃ is any amino acid other than Phe; where X₄ is any amino acid other than Tyr; and where X₅ is any amino acid other than Gln. In some cases, X₁ is Ala. In some cases, X₂ is Ala. In some cases, X₃ is Ala. In some cases, X₄ is Ala. In some cases, X₅ is Ala. In some cases, X₁ is Ala; X₂ is Ala; X₃ is Ala; X₄ is Ala; X₅ is Ala; and

(SEQ ID NO: 197)
APTSSSTKKT QLQLEX₁LLLD LQMILNGINN YKNPKLTRML
TX₂KFYMPKKA TELKHLQCLE EELKPLEEVL NLAQSKNFHL
RPRDLISNIN VIVLELKGSE TTFMCEYADE TATIVEFLNR
WITFCX₃SIIS TLT,

where X₁ is any amino acid other than His; where X₂ is any amino acid other than Phe; and where X₃ is any amino acid other than Gln. In some cases, X₁ is Ala. In some cases, X₂ is Ala. In some cases, X₃ is Ala. In some cases, X₁ is Ala; X₂ is Ala; and X₃ is Ala.

### Additional Polypeptides

[0284] A polypeptide chain of a TMMP of the present disclosure can include one or more polypeptides in addition to those described above. Suitable additional polypeptides include epitope tags and affinity domains. The one or more additional polypeptide can be included at the N-terminus of a polypeptide chain of a TMMP, at the C-terminus of a polypeptide chain of a TMMP, or internally within a polypeptide chain of a TMMP.

### Epitope Tag

[0285] Suitable epitope tags include, but are not limited to, hemagglutinin (HA; e.g., YPYDVPDYA (SEQ ID NO:271); FLAG (e.g., DYKDDDDK (SEQ ID NO:272); c-myc (e.g., EQKLISEEDL; SEQ ID NO:273), and the like.

### Affinity Domain

[0286] Affinity domains include peptide sequences that can interact with a binding partner, e.g., such as one immobilized on a solid support, useful for identification or purification. DNA sequences encoding multiple consecutive single amino acids, such as histidine, when fused to the expressed protein, may be used for one-step purification of the recombinant protein by high affinity binding to a resin column, such as nickel sepharose. Exemplary affinity domains include His5 (HHHHH) (SEQ ID NO:271), HisX6 (HHHHHH) (SEQ ID NO:275), C-myc (EQKLISEEDL) (SEQ ID NO:276), Flag (DYKDDDDK) (SEQ ID NO:277), StrepTag (WSHPQFEK) (SEQ ID NO:278), hemagglutinin, e.g., HA Tag (YPYDVPDYA) (SEQ ID NO:279), glutathione-S-transferase (GST), thioredoxin, cellulose binding domain, RYIRS (SEQ ID NO:280), Phe-His-His-Thr (SEQ ID NO:281), chitin binding domain, S-peptide, T7 peptide, SH2 domain, C-end RNA tag, WEAAAREACCRECCARA (SEQ ID NO:282), metal binding domains, e.g., zinc binding domains or calcium binding domains such as those from calcium-binding proteins, e.g., calmodulin, troponin C, calcineurin B, myosin light chain, recoverin, S-modulin, visinin, VILIP, neurocalcin, hippocalcin, frequenin, caltractin, calpain large-subunit, 5100 proteins, parvalbumin, calbindin D9K, calbindin D28K, and calretinin, inteins, biotin, streptavidin, MyoD, Id, leucine zipper sequences, and maltose binding protein.

### Drug Conjugates

[0287] A polypeptide chain of a TMMP of the present disclosure can comprise a small molecule drug linked (e.g., covalently attached) to the polypeptide chain. For example, where a TMMP of the present disclosure comprises an Fc polypeptide, the Fc polypeptide can comprise a covalently linked small molecule drug. In some cases, the small molecule drug is a cancer chemotherapeutic agent, e.g., a cytotoxic agent. A polypeptide chain of a TMMP of the present disclosure can comprise a cytotoxic agent linked (e.g., covalently attached) to the polypeptide chain. For example, where a TMMP of the present disclosure comprises an Fc polypeptide, the Fc polypeptide can comprise a covalently linked cytotoxic agent. Cytotoxic agents include prodrugs.

[0288] A drug (e.g., a cancer chemotherapeutic agent) can be linked directly or indirectly to a polypeptide chain of a TMMP of the present disclosure. For example, where a TMMP of the present disclosure comprises an Fc polypeptide, a drug (e.g., a cancer chemotherapeutic agent) can be linked directly or indirectly to the Fc polypeptide. Direct linkage can involve linkage directly to an amino acid side chain. Indirect linkage can be linkage via a linker. A drug (e.g., a cancer chemotherapeutic agent) can be linked to a polypeptide chain (e.g., an Fc polypeptide) of a TMMP of the present disclosure via a thioether bond, an amide bond, a carbamate bond, a disulfide bond, or an ether bond.

[0289] Linkers include cleavable linkers and non-cleavable linkers. In some cases, the linker is a protease-cleavable linker. Suitable linkers include, e.g., peptides (e.g., from 2 to 10 amino acids in length; e.g., 2, 3, 4, 5, 6, 7, 8, 9, or 10 amino acids in length), alkyl chains, poly(ethylene glycol), disulfide groups, thioether groups, acid labile groups, photolabile groups, peptidase labile groups, and esterase labile groups. Non-limiting example of suitable linkers are: i) N-succinimidyl-[(N-maleimidopropionamido)-tetraethyleneglycol]ester (NHS-PEG4-maleimide); ii) N-succinimidyl 4-(2-pyridyldithio)butanoate (SPDB); N-succinimidyl 4-(2-pyridyldithio)2-sulfobutanoate (sulfo-SPDB); N-succinimidyl 4-(2-pyridyldithio) pentanoate (SPP); N-succinimidyl-4-(N-maleimidomethyl)-cyclohexane-1-carboxy-(6-amidocaproate) (LC-SMCC); κ-maleimidoundecanoic acid N-succinimidyl ester (KMUA); γ-maleimide butyric acid N-succinimidyl ester (GMBS); ε-maleimidocaproic acid N-hydroxysuccinimide ester (EMCS); m-maleimide benzoyl-N-hydroxysuccinimide ester (MBS); N-(α-maleimidoacetoxy)-succinimide ester (AMAS); succinimidyl-6-(β-maleimidopropionamide)hexanoate (SMPH); N-succinimidyl 4-(p-maleimidophenyl)butyrate (SMPB); N-(p-maleimidophenyl)isocyanate (PMPI); N-succinimidyl 4(2-pyridylthio)pentanoate (SPP); N-succinimidyl(4-iodo-acetyl)aminobenzoate (SIAB); 6-maleimidocaproyl (MC); maleimidopropanoyl (MP); p-aminobenzyloxycarbonyl (PAB); N-succinimidyl 4-(maleimidomethyl)cyclohexanecarboxylate (SMCC); N-succinimidyl-4-(N-maleimidomethyl)-cyclohexane-1-carboxy-(6-amidocaproate), a “long chain” analog of SMCC (LC-SMCC); 3-maleimidopropanoic acid N-succinimidyl ester (BMPS); N-succinimidyl iodoacetate (SIA); N-succinimidyl bromoacetate (SBA); and N-succinimidyl 3-(bromoacetamido)propionate (SBAP).

[0290] A polypeptide (e.g., an Fc polypeptide) can be modified with crosslinking reagents such as succinimidyl 4-(N-maleimidomethyl)-cyclohexane-1-carboxylate (SMCC), sulfo-SMCC, maleimidobenzoyl-N-hydroxysuccinimide ester (MBS), sulfo-MBS or succinimidyl-iodoacetate, as described in the literature, to introduce 1-10 reactive groups. The modified Fc polypeptide is then reacted with a thiol-containing cytotoxic agent to produce a conjugate.

[0291] For example, where a TMMP of the present disclosure comprises an Fc polypeptide, the polypeptide chain comprising the Fc polypeptide can be of the formula (A)-(L)-(C), where (A) is the polypeptide chain comprising the Fc polypeptide; where (L), if present, is a linker; and where (C) is a cytotoxic agent. (L), if present, links (A) to (C). In some cases, the polypeptide chain comprising the Fc polypeptide can comprise more than one cytotoxic agent (e.g., 2, 3, 4, or 5, or more than 5, cytotoxic agents).

[0292] Suitable drugs include, e.g., rapamycin. Suitable drugs include, e.g., retinoids, such as all-trans retinoic acid (ATRA); vitamin D3; a vitamin D3 analog; and the like. As noted above, in some cases, a drug is a cytotoxic agent. Cytotoxic agents are known in the art. A suitable cytotoxic agent can be any compound that results in the death of a cell, or induces cell death, or in some manner decreases cell viability, and includes, for example, maytansinoids and maytansinoid analogs, benzodiazepines, taxoids, CC-1065 and CC-1065 analogs, duocarmycins and duocarmycin analogs, enediynes, such as calicheamicins, dolastatin and dolastatin analogs including auristatins, tomaymycin derivatives, leptomycin derivatives, methotrexate, cisplatin, carboplatin, daunorubicin, doxorubicin, vincristine, vinblastine, melphalan, mitomycin C, chlorambucil and morpholino doxorubicin.

[0293] For example, in some cases, the cytotoxic agent is a compound that inhibits microtubule formation in eukaryotic cells. Such agents include, e.g., maytansinoid, benzodiazepine, taxoid, CC-1065, duocarmycin, a duocarmycin analog, calicheamicin, dolastatin, a dolastatin analog, auristatin, tomaymycin, and leptomycin, or a pro-drug of any one of the foregoing. Maytansinoid compounds include, e.g., N(2′)-deacetyl-N(2′)-(3-mercapto-1-oxopropyl)-maytansine (DM1); N(2′)-deacetyl-N(2′)-(4-mercapto-1-oxopentyl)-maytansine (DM3); and N(2′)-deacetyl-N2-(4-mercapto-4-methyl-1-oxopentyl)-maytansine (DM4). Benzodiazepines include, e.g., indolinobenzodiazepines and oxazolidinobenzodiazepines.

[0294] Cytotoxic agents include taxol; cytochalasin B; gramicidin D; ethidium bromide; emetine; mitomycin; etoposide; tenoposide; vincristine; vinblastine; colchicin; doxorubicin; daunorubicin; dihydroxy anthracin dione; maytansine or an analog or derivative thereof; an auristatin or a functional peptide analog or derivative thereof; dolastatin 10 or 15 or an analogue thereof; irinotecan or an analogue thereof; mitoxantrone; mithramycin; actinomycin D; 1-dehydrotestosterone; a glucocorticoid; procaine; tetracaine; lidocaine; propranolol; puromycin; calicheamicin or an analog or derivative thereof; an antimetabolite; 6 mercaptopurine; 6 thioguanine; cytarabine; fludarabin; 5 fluorouracil; decarbazine; hydroxyurea; asparaginase; gemcitabine; cladribine; an alkylating agent; a platinum derivative; duocarmycin A; duocarmycin SA; rachelmycin (CC-1065) or an analog or derivative thereof; an antibiotic; pyrrolo[2,1-c][1,4]-benzodiazepines (PDB); diphtheria toxin; ricin toxin; cholera toxin; a Shiga-like toxin; LT toxin; C3 toxin; Shiga toxin; pertussis toxin; tetanus toxin; soybean Bowman-Birk protease inhibitor; Pseudomonas exotoxin; alorin; saporin; modeccin; gelanin; abrin A chain; modeccin A chain; alpha-sarcin; Aleurites fordii proteins; dianthin proteins; Phytolacca americana proteins; Momordica charantia inhibitor; curcin; crotin; Sapaonaria officinalis inhibitor; gelonin; mitogellin; restrictocin; phenomycin; enomycin toxins; ribonuclease (RNase); DNase I; Staphylococcal enterotoxin A; pokeweed antiviral protein; diphtherin toxin; and Pseudomonas endotoxin.

### Exemplary TMMPs

[0295] A TMMP of the present disclosure comprises at least one heterodimer comprising: a) a first polypeptide comprising: i) a peptide epitope; and ii) first MHC polypeptide; b) a second polypeptide comprising a second MHC polypeptide, and c) at least one immunomodulatory polypeptide, where the first and/or the second polypeptide comprises the immunomodulatory polypeptide. Thus, in some cases, a TMMP of the present disclosure comprises at least one heterodimer comprising: a) a first polypeptide comprising: i) a peptide epitope; ii) first MHC polypeptide; and iii) at least one immunomodulatory polypeptide; and b) a second polypeptide comprising a second MHC polypeptide. In other instances, a TMMP of the present disclosure comprises at least one heterodimer comprising: a) a first polypeptide comprising: i) a peptide epitope; and ii) first MHC polypeptide; and b) a second polypeptide comprising: i) a second MHC polypeptide; and ii) at least one immunomodulatory polypeptide. In some cases, a TMMP of the present disclosure comprises at least one heterodimer comprising: a) a first polypeptide comprising: i) a peptide epitope; ii) first MHC polypeptide; and iii) at least one immunomodulatory polypeptide; and b) a second polypeptide comprising: i) a second MHC polypeptide; and ii) at least one immunomodulatory polypeptide. In some cases, the at least one immunomodulatory polypeptide is a wild-type immunomodulatory polypeptide. In other cases, the at least one immunomodulatory polypeptide is a variant immunomodulatory polypeptide that exhibits reduced affinity for a co-immunomodulatory polypeptide, compared to the affinity of a corresponding wild-type immunomodulatory polypeptide for the co-immunomodulatory polypeptide. In some cases, a TMMP of the present disclosure comprises two immunomodulatory polypeptides, where the two immunomodulatory polypeptides have the same amino acid sequence. In some cases, the peptide epitope present in a TMMP of the present disclosure is a cancer-associated peptide. In some cases, the peptide epitope present in a TMMP of the present disclosure is an infectious disease-associated peptide (e.g., a virus-encoded peptide).

[0296] In some cases, a TMMP of the present disclosure comprises: a) a first polypeptide comprising, in order from N-terminus to C-terminus: i) a peptide epitope; ii) a first MHC polypeptide; and iii) at least one immunomodulatory polypeptide; and b) a second polypeptide comprising, in order from N-terminus to C-terminus: i) a second MHC polypeptide; and ii) an Ig Fc polypeptide. In some cases, the first MHC polypeptide is a β2M polypeptide; and the second MHC polypeptide is an HLA heavy chain polypeptide. In some cases, the HLA heavy chain polypeptide is an HLA-A24 polypeptide. In some cases, the HLA heavy chain polypeptide is an HLA-A24 polypeptide with an A236C substitution. In some cases, the first polypeptide comprises, in order from N-terminus to C-terminus: i) a peptide epitope; ii) a first MHC polypeptide; and iii) two immunomodulatory polypeptides, where the two immunomodulatory polypeptides have the same amino acid sequence. In some cases, the Ig Fc polypeptide is a human IgG1 Fc polypeptide. In some cases, the Ig Fc polypeptide is an IgG1 Fc polypeptide comprising L234A and L235A substitutions. In some cases, the first and the second polypeptides are disulfide linked to one another. In some cases, the immunomodulatory polypeptide is a variant IL-2 polypeptide comprising H16A and F42A substitutions. In some cases, the immunomodulatory polypeptide is a variant IL-2 polypeptide comprising H16T and F42A substitutions. In some cases, a peptide linker is between one or more of: i) the second MHC polypeptide and the Ig Fc polypeptide; ii) the epitope and the first MHC polypeptide; iii) the first MHC polypeptide and the immunomodulatory polypeptide; and (where the TMMP comprises two immunomodulatory polypeptides on the first polypeptide chain) iv) between the two immunomodulatory polypeptides. In some cases, the peptide linker comprises the amino acid sequence AAAGG (SEQ ID NO:283). In some cases, the peptide linker comprises the amino acid sequence (GGGGS)n (SEQ ID NO″284), where n is an integer from 1 to 10 (e.g., where n is 2, 3, or 4). In some cases, the peptide epitope present in a TMMP of the present disclosure is a cancer-associated peptide. In some cases, the peptide epitope present in a TMMP of the present disclosure is an infectious disease-associated peptide (e.g., a virus-encoded peptide).

[0297] In some cases, a TMMP of the present disclosure comprises: a) a first polypeptide comprising, in order from N-terminus to C-terminus: i) a peptide epitope; and ii) a first MHC polypeptide; and b) a second polypeptide comprising, in order from N-terminus to C-terminus: i) at least one immunomodulatory polypeptide; ii) a second MHC polypeptide; and iii) an Ig Fc polypeptide. In some cases, the first MHC polypeptide is a β2M polypeptide; and the second MHC polypeptide is an HLA heavy chain polypeptide. In some cases, the HLA heavy chain polypeptide is an HLA-A24 polypeptide. In some cases, the HLA heavy chain polypeptide is an HLA-A24 polypeptide with an A236C substitution. In some cases, the second polypeptide comprises, in order from N-terminus to C-terminus: i) two immunomodulatory polypeptides, where the two immunomodulatory polypeptides have the same amino acid sequence; ii) a second MHC polypeptide; and iii) an Ig Fc polypeptide. In some cases, the Ig Fc polypeptide is a human IgG1 Fc polypeptide. In some cases, the Ig Fc polypeptide is an IgG1 Fc polypeptide comprising L234A and L235A substitutions. In some cases, the first and the second polypeptides are disulfide linked to one another. In some cases, the immunomodulatory polypeptide is a variant IL-2 polypeptide comprising H16A and F42A substitutions. In some cases, the immunomodulatory polypeptide is a variant IL-2 polypeptide comprising H16T and F42A substitutions. In some cases, a peptide linker is between one or more of: i) the second MHC polypeptide and the Ig Fc polypeptide; ii) the epitope and the first MHC polypeptide; iii) the first MHC polypeptide and the immunomodulatory polypeptide; and (where the TMMP comprises two immunomodulatory polypeptides on the second polypeptide chain) iv) between the two immunomodulatory polypeptides. In some cases, the peptide linker comprises the amino acid sequence AAAGG (SEQ ID NO: 283). In some cases, the peptide linker comprises the amino acid sequence (GGGGS)n (SEQ ID NO: 284), where n is an integer from 1 to 10 (e.g., where n is 2, 3, or 4). In some cases, the peptide epitope present in a TMMP of the present disclosure is a cancer-associated peptide. In some cases, the peptide epitope present in a TMMP of the present disclosure is an infectious disease-associated peptide (e.g., a virus-encoded peptide).

[0298] In some cases, a TMMP of the present disclosure comprises: a) a first polypeptide comprising, in order from N-terminus to C-terminus: i) a peptide epitope; and ii) a first MHC polypeptide; and b) a second polypeptide comprising, in order from N-terminus to C-terminus: i) a second MHC polypeptide; ii) an Ig Fc polypeptide; and iii) at least one immunomodulatory polypeptide. In some cases, the first MHC polypeptide is a β2M polypeptide; and the second MHC polypeptide is an HLA heavy chain polypeptide. In some cases, the HLA heavy chain polypeptide is an HLA-A24 polypeptide. In some cases, the HLA heavy chain polypeptide is an HLA-A24 polypeptide with an A236C substitution. In some cases, the second polypeptide comprises, in order from N-terminus to C-terminus: i) a second MHC polypeptide; ii) an Ig Fc polypeptide; and iii) two immunomodulatory polypeptides, where the two immunomodulatory polypeptides have the same amino acid sequence. In some cases, the Ig Fc polypeptide is a human IgG1 Fc polypeptide. In some cases, the Ig Fc polypeptide is an IgG1 Fc polypeptide comprising L234A and L235A substitutions. In some cases, the first and the second polypeptides are disulfide linked to one another. In some cases, the immunomodulatory polypeptide is a variant IL-2 polypeptide comprising H16A and F42A substitutions. In some cases, the immunomodulatory polypeptide is a variant IL-2 polypeptide comprising H16T and F42A substitutions. In some cases, a peptide linker is between one or more of: i) the second MHC polypeptide and the Ig Fc polypeptide; ii) the epitope and the first MHC polypeptide; iii) the Ig Fc polypeptide and the immunomodulatory polypeptide; and (where the TMMP comprises two immunomodulatory polypeptides on the second polypeptide chain) iv) between the two immunomodulatory polypeptides. In some cases, the peptide linker comprises the amino acid sequence AAAGG (SEQ ID NO:283). In some cases, the peptide linker comprises the amino acid sequence (GGGGS)n (SEQ ID NO: 284), where n is an integer from 1 to 10 (e.g., where n is 2, 3, or 4).

[0299] In some cases, a TMMP of the present disclosure comprises: a) a first polypeptide comprising, in order from N-terminus to C-terminus: i) a peptide epitope; and ii) a first MHC polypeptide; and b) a second polypeptide comprising, in order from N-terminus to C-terminus: i) at least one immunomodulatory polypeptide; ii) a second MHC polypeptide; and iii) an Ig Fc polypeptide. In some cases, the first MHC polypeptide is a β2M polypeptide; and the second MHC polypeptide is an HLA heavy chain polypeptide. In some cases, the HLA heavy chain polypeptide is an HLA-A24 polypeptide. In some cases, the HLA heavy chain polypeptide is an HLA-A24 polypeptide with an A236C substitution. In some cases, the Ig Fc polypeptide is a human IgG1 Fc polypeptide. In some cases, the Ig Fc polypeptide is an IgG1 Fc polypeptide comprising L234A and L235A substitutions. In some cases, the first and the second polypeptides are disulfide linked to one another. In some cases, the immunomodulatory polypeptide is a variant IL-2 polypeptide comprising H16A and F42A substitutions. In some cases, the immunomodulatory polypeptide is a variant IL-2 polypeptide comprising H16T and F42A substitutions.

[0300] In some cases, a TMMP of the present disclosure comprises: a) a first polypeptide comprising, in order from N-terminus to C-terminus: i) at least one immunomodulatory polypeptide; ii) a peptide epitope; and iii) a first MHC polypeptide; and b) a second polypeptide comprising, in order from N-terminus to C-terminus: i) a second MHC polypeptide; and ii) an Ig Fc polypeptide. In some cases, the first MHC polypeptide is a β2M polypeptide; and the second MHC polypeptide is an HLA heavy chain polypeptide. In some cases, the HLA heavy chain polypeptide is an HLA-A24 polypeptide. In some cases, the HLA heavy chain polypeptide is an HLA-A24 polypeptide with an A236C substitution. In some cases, the first polypeptide comprises, in order from N-terminus to C-terminus: i) two immunomodulatory polypeptides, where the two immunomodulatory polypeptides have the same amino acid sequence; ii) a peptide epitope; and iii) a first MHC polypeptide. In some cases, the Ig Fc polypeptide is a human IgG1 Fc polypeptide. In some cases, the Ig Fc polypeptide is an IgG1 Fc polypeptide comprising L234A and L235A substitutions. In some cases, the first and the second polypeptides are disulfide linked to one another. In some cases, the immunomodulatory polypeptide is a variant IL-2 polypeptide comprising H16A and F42A substitutions. In some cases, the immunomodulatory polypeptide is a variant IL-2 polypeptide comprising H16T and F42A substitutions. In some cases, a peptide linker is between one or more of: i) the second MHC polypeptide and the Ig Fc polypeptide; ii) the epitope and the first MHC polypeptide; iii) the immunomodulatory polypeptide and the epitope; and (where the TMMP comprises two immunomodulatory polypeptides on the first polypeptide chain) iv) between the two immunomodulatory polypeptides. In some cases, the peptide linker comprises the amino acid sequence AAAGG (SEQ ID NO: 283). In some cases, the peptide linker comprises the amino acid sequence (GGGGS)n (SEQ ID NO: 284), where n is an integer from 1 to 10 (e.g., where n is 2, 3, or 4).

[0301] In some cases, a TMMP of the present disclosure comprises: a) a first polypeptide comprising, in order from N-terminus to C-terminus: i) a peptide epitope; and ii) a first MHC polypeptide; and b) a second polypeptide comprising, in order from N-terminus to C-terminus: i) a second MHC polypeptide; ii) at least one immunomodulatory polypeptide; and iii) an Ig Fc polypeptide. In some cases, the first MHC polypeptide is a β2M polypeptide; and the second MHC polypeptide is an HLA heavy chain polypeptide. In some cases, the HLA heavy chain polypeptide is an HLA-A24 polypeptide. In some cases, the HLA heavy chain polypeptide is an HLA-A24 polypeptide with an A236C substitution. In some cases, the second polypeptide comprises, in order from N-terminus to C-terminus: i) a second MHC polypeptide; ii) two immunomodulatory polypeptides, where the two immunomodulatory polypeptides have the same amino acid sequence; and iii) an Ig Fc polypeptide. In some cases, the Ig Fc polypeptide is a human IgG1 Fc polypeptide. In some cases, the Ig Fc polypeptide is an IgG1 Fc polypeptide comprising L234A and L235A substitutions. In some cases, the first and the second polypeptides are disulfide linked to one another. In some cases, the immunomodulatory polypeptide is a variant IL-2 polypeptide comprising H16A and F42A substitutions. In some cases, the immunomodulatory polypeptide is a variant IL-2 polypeptide comprising H16T and F42A substitutions. In some cases, a peptide linker is between one or more of: i) the second MHC polypeptide and the immunomodulatory polypeptide; ii) the immunomodulatory polypeptide and the Ig Fc polypeptide; iii) the epitope and the first MHC polypeptide; iii) the first MHC polypeptide and the immunomodulatory polypeptide; and (where the TMMP comprises two immunomodulatory polypeptides on the second polypeptide chain) iv) between the two immunomodulatory polypeptides. In some cases, the peptide linker comprises the amino acid sequence AAAGG (SEQ ID NO: 283). In some cases, the peptide linker comprises the amino acid sequence (GGGGS)n (SEQ ID NO: 284), where n is an integer from 1 to 10 (e.g., where n is 2, 3, or 4).

[0302] As noted above, and as depicted schematically in FIG. 14, an immunomodulatory polypeptide (i.e., one or more immunomodulatory polypeptides) can be present in a TMMP of the present disclosure at any of a variety of positions. FIG. 14 depicts the position of two copies of a variant IL-2 polypeptide; however, the immunomodulatory polypeptide can be any of a variety of immunomodulatory polypeptide, as described herein. As depicted in FIG. 14, an immunomodulatory polypeptide can be: 1) N-terminal to the MHC class I heavy chain (position 1); 2) C-terminal to the MHC class I heavy chain and N-terminal to the Ig Fc polypeptide; in other words, between the MHC class I heavy chain and the Ig Fc polypeptide (position 2); 3) C-terminal to the Ig Fc polypeptide (position 3); 4) N-terminal to the peptide epitope (position 4); or 5) C-terminal to the β2M polypeptide (position 5). “Position 1” refers to a position of the immunomodulatory polypeptide on the same polypeptide chain as the class I MHC heavy chain and N-terminal to the class I MHC heavy chain; e.g., where the TMMP comprises: a) a first polypeptide comprising, in order from N-terminus to C-terminus: i) a peptide epitope; and ii) a β2M polypeptide; and b) a second polypeptide comprising, in order from N-terminus to C-terminus: i) one or more immunomodulatory polypeptides; and ii) a class I MHC heavy chain polypeptide. “Position 2” refers to a position of the immunomodulatory polypeptide on the same polypeptide chain as the class I MHC heavy chain and C-terminal to the class I MHC heavy chain, but not at the C-terminus of the polypeptide chain; e.g., where the TMMP comprises: a) a first polypeptide comprising, in order from N-terminus to C-terminus: i) a peptide epitope; and ii) a β2M polypeptide; and b) a second polypeptide comprising, in order from N-terminus to C-terminus: i) a class I MHC heavy chain polypeptide; ii) one or more immunomodulatory polypeptides; and iii) an Ig Fc polypeptide. “Position 3” refers to a position of the immunomodulatory polypeptide on the same polypeptide chain as the class I MHC heavy chain and at the C-terminus of the polypeptide chain; e.g., where the TMMP comprises: a) a first polypeptide comprising, in order from N-terminus to C-terminus: i) a peptide epitope; and ii) a β2M polypeptide; and b) a second polypeptide comprising, in order from N-terminus to C-terminus: i) a class I MHC heavy chain polypeptide; ii) an Ig Fc polypeptide; and iii) one or more immunomodulatory polypeptides. “Position 4” refers to a position of the immunomodulatory polypeptide on the same polypeptide chain as the β2M polypeptide and N-terminal to the peptide epitope and the β2M polypeptide; e.g., where the TMMP comprises: a) a first polypeptide comprising, in order from N-terminus to C-terminus: i) one or more immunomodulatory polypeptides; ii) a peptide epitope; and iii) a β2M polypeptide; and b) a second polypeptide comprising a class I MHC heavy chain polypeptide (e.g., a second polypeptide comprising, in order from N-terminus to C-terminus: i) a class I MHC heavy chain polypeptide; and ii) an Ig Fc polypeptide. “Position 5” refers to a position of the immunomodulatory polypeptide on the same polypeptide chain as the β2M polypeptide and C-terminal to the β2M polypeptide (e.g., at the C-terminus of the polypeptide chain); e.g., where the TMMP comprises: a) a first polypeptide comprising, in order from N-terminus to C-terminus: i) a peptide epitope; ii) a β2M polypeptide; and iii) one or more immunomodulatory polypeptides; and b) a second polypeptide comprising a class I MHC heavy chain polypeptide (e.g., a second polypeptide comprising, in order from N-terminus to C-terminus: i) a class I MHC heavy chain polypeptide; and ii) an Ig Fc polypeptide.

[0303] Furthermore, as discussed above and as depicted schematically in FIG. 13A-13C, the first polypeptide chain and the second polypeptide chain of a TMMP of the present disclosure can be linked by one or more disulfide bonds. For example, a TMMP of the present disclosure can comprise: a) a first polypeptide chain comprising an β2M polypeptide having an R12C substitution; and b) a second polypeptide chain comprising a class I MHC heavy chain polypeptide having an A236C substitution; such that a disulfide bond forms between the Cys at position 12 of the β2M polypeptide in the first polypeptide chain and the Cys at position 236 of the class I MHC heavy chain polypeptide in the second polypeptide chain. As another example, a TMMP of the present disclosure can comprise: a) a first polypeptide comprising, in order from N-terminus to C-terminus: i) a peptide epitope; ii) a peptide linker comprising a GCGG(G4S)ₙ sequence, where n is 1, 2, or 3; and iii) a β2M polypeptide; and b) a second polypeptide comprising a class I MHC heavy chain polypeptide having a Y84C substitution, such that a disulfide bond forms between the Cys in the peptide linker in the first polypeptide chain and the Cys at position 84 of the class I MHC heavy chain polypeptide in the second polypeptide chain. In other examples, a TMMP of the present disclosure can comprise: a) a first polypeptide comprising, in order from N-terminus to C-terminus: i) a peptide epitope; ii) a peptide linker comprising a GCGG(G4S)ₙ sequence, where n is 1, 2, or 3; and iii) a β2M polypeptide having an R12C substitution; and b) a second polypeptide comprising a class I MHC heavy chain polypeptide having a Y84C substitution and an A236C substitution; such that: i) a first disulfide bond forms between the Cys in the peptide linker in the first polypeptide chain and the Cys at position 84 of the class I MHC heavy chain polypeptide in the second polypeptide chain; and ii) a second disulfide bond forms between the Cys at position 12 of the β2M polypeptide in the first polypeptide chain and the Cys at position 236 of the class I MHC heavy chain polypeptide in the second polypeptide chain. For simplicity, the first disulfide bond is referred to as “G2C/Y84C”; and the second disulfide bond is referred to as “R12C/A236C.” A TMMP of the present disclosure can include: a) a G2C/Y84C disulfide bond and not an R12C/A236C disulfide bond; b) an R12C/A236C disulfide bond and not a G2C/Y84C disulfide bond; or c) a G2C/Y84C disulfide bond and an R12C/A236C disulfide bond.

[0304] A TMMP of the present disclosure can include: a) a G2C/Y84C disulfide bond and not an R12C/A236C disulfide bond; and b) at least one immunomodulatory polypeptide at position 1. A TMMP of the present disclosure can include: a) a G2C/Y84C disulfide bond and not an R12C/A236C disulfide bond; and b) at least one immunomodulatory polypeptide at position 2. A TMMP of the present disclosure can include: a) a G2C/Y84C disulfide bond and not an R12C/A236C disulfide bond; and b) at least one immunomodulatory polypeptide at position 3. A TMMP of the present disclosure can include: a) a G2C/Y84C disulfide bond and not an R12C/A236C disulfide bond; and b) at least one immunomodulatory polypeptide at position 4. A TMMP of the present disclosure can include: a) a G2C/Y84C disulfide bond and not an R12C/A236C disulfide bond; and b) at least one immunomodulatory polypeptide at position 5.

[0305] A TMMP of the present disclosure can include: a) an R12C/A236C disulfide bond and not a G2C/Y84C disulfide bond; and at least one immunomodulatory polypeptide at position 1. A TMMP of the present disclosure can include: a) an R12C/A236C disulfide bond and not a G2C/Y84C disulfide bond; and at least one immunomodulatory polypeptide at position 2. A TMMP of the present disclosure can include: a) an R12C/A236C disulfide bond and not a G2C/Y84C disulfide bond; and at least one immunomodulatory polypeptide at position 3. A TMMP of the present disclosure can include: a) an R12C/A236C disulfide bond and not a G2C/Y84C disulfide bond; and at least one immunomodulatory polypeptide at position 4. A TMMP of the present disclosure can include: a) an R12C/A236C disulfide bond and not a G2C/Y84C disulfide bond; and at least one immunomodulatory polypeptide at position 5.

[0306] A TMMP of the present disclosure can include: a) a G2C/Y84C disulfide bond and an R12C/A236C disulfide bond; and b) and at least one immunomodulatory polypeptide at position 1. A TMMP of the present disclosure can include: a) a G2C/Y84C disulfide bond and an R12C/A236C disulfide bond; and b) and at least one immunomodulatory polypeptide at position 2. A TMMP of the present disclosure can include: a) a G2C/Y84C disulfide bond and an R12C/A236C disulfide bond; and b) and at least one immunomodulatory polypeptide at position 3. A TMMP of the present disclosure can include: a) a G2C/Y84C disulfide bond and an R12C/A236C disulfide bond; and b) and at least one immunomodulatory polypeptide at position 4. A TMMP of the present disclosure can include: a) a G2C/Y84C disulfide bond and an R12C/A236C disulfide bond; and b) and at least one immunomodulatory polypeptide at position 5.

### Methods of Generating a Multimeric T-Cell Modulatory Polypeptide

[0307] The present disclosure provides a method of obtaining a TMMP comprising one or more variant immunomodulatory polypeptides that exhibit lower affinity for a cognate co-immunomodulatory polypeptide compared to the affinity of the corresponding parental wild-type immunomodulatory polypeptide for the co-immunomodulatory polypeptide, the method comprising: A) generating a library of TMMPs comprising a plurality of members, wherein each member comprises: a) a first polypeptide comprising: i) an epitope; and ii) a first major MHC polypeptide; and b) a second polypeptide comprising: i) a second MHC polypeptide; and ii) optionally an Ig Fc polypeptide or a non-Ig scaffold, wherein each member comprises a different variant immunomodulatory polypeptide on the first polypeptide, the second polypeptide, or both the first and the second polypeptide; B) determining the affinity of each member of the library for a cognate co-immunomodulatory polypeptide; and C) selecting a member that exhibits reduced affinity for the cognate co-immunomodulatory polypeptide. In some cases, the affinity is determined by bio-layer interferometry (BLI) using purified TMMP library members and the cognate co-immunomodulatory polypeptide. BLI methods are well known to those skilled in the art. A BLI assay is described above. See, e.g., Lad et al. (2015) J. Biomol. Screen. 20(4): 498-507; and Shah and Duncan (2014) J. Vis. Exp. 18:e51383.

[0308] The present disclosure provides a method of obtaining a TMMP that exhibits selective binding to a T-cell, the method comprising: A) generating a library of TMMPs comprising a plurality of members, wherein each member comprises: a) a first polypeptide comprising: i) an epitope; and ii) a first MHC polypeptide; and b) a second polypeptide comprising: i) a second MHC polypeptide; and ii) optionally an immunoglobulin (Ig) Fc polypeptide or a non-Ig scaffold, wherein each member comprises a different variant immunomodulatory polypeptide on the first polypeptide, the second polypeptide, or both the first and the second polypeptide, wherein the variant immunomodulatory polypeptide differs in amino acid sequence by from 1 amino acid to 10 amino acids from a parental wild-type immunomodulatory polypeptide; B) contacting a TMMP library member with a target T-cell expressing on its surface: i) a cognate co-immunomodulatory polypeptide that binds the parental wild-type immunomodulatory polypeptide; and ii) a T-cell receptor that binds to the epitope, wherein the TMMP library member comprises an epitope tag, such that the TMMP library member binds to the target T-cell; C) contacting the TMMP library member bound to the target T-cell with a fluorescently labeled binding agent that binds to the epitope tag, generating a TMMP library member/target T-cell/binding agent complex; D) measuring the mean fluorescence intensity (MFI) of the TMMP library member/target T-cell/binding agent complex using flow cytometry, wherein the MFI measured over a range of concentrations of the TMMP library member provides a measure of the affinity and apparent avidity; and E) selecting a TMMP library member that selectively binds the target T cell, compared to binding of the TMMP library member to a control T cell that comprises: i) the cognate co-immunomodulatory polypeptide that binds the parental wild-type immunomodulatory polypeptide; and ii) a T-cell receptor that binds to an epitope other than the epitope present in the TMMP library member. In some cases, a TMMP library member that is identified as selectively binds to a target T cell is isolated from the library.

[0309] In some cases, a parental wild-type immunomodulatory polypeptide and cognate immunomodulatory polypeptide pairs are selected from:

[0310] IL-2 and IL-2 receptor;

[0311] 4-1BBL and 4-1BB;

[0312] PD-L1 and PD-1;

[0313] CD70 and CD27;

[0314] TGFβ and TGFβ receptor;

[0315] CD80 and CD28;

[0316] CD86 and CD28;

[0317] OX40L and OX40;

[0318] FasL and Fas;

[0319] ICOS-L and ICOS;

[0320] ICAM and LFA-1;

[0321] JAG1 and Notch;

[0322] JAG1 and CD46;

[0323] CD80 and CTLA4; and

[0324] CD86 and CTLA4.

[0325] The present disclosure provides a method of obtaining a TMMP comprising one or more variant immunomodulatory polypeptides that exhibit reduced affinity for a cognate co-immunomodulatory polypeptide compared to the affinity of the corresponding parental wild-type immunomodulatory polypeptide for the co-immunomodulatory polypeptide, the method comprising selecting, from a library of TMMPs comprising a plurality of members, a member that exhibits reduced affinity for the cognate co-immunomodulatory polypeptide, wherein the plurality of member comprises: a) a first polypeptide comprising: i) an epitope; and ii) a first MHC polypeptide; and b) a second polypeptide comprising: i) a second MHC polypeptide; and ii) optionally an Ig Fc polypeptide or a non-Ig scaffold, wherein the members of the library comprise a plurality of variant immunomodulatory polypeptide present in the first polypeptide, the second polypeptide, or both the first and the second polypeptide. In some cases, the selecting step comprises determining the affinity, using bio-layer interferometry, of binding between TMMP library members and the cognate co-immunomodulatory polypeptide. In some cases, the TMMP is as described above.

[0326] In some cases, the method further comprises: a) contacting the selected TMMP library member with a target T-cell expressing on its surface: i) a cognate co-immunomodulatory polypeptide that binds the parental wild-type immunomodulatory polypeptide; and ii) a T-cell receptor that binds to the epitope, wherein the TMMP library member comprises an epitope tag, such that the TMMP library member binds to the target T-cell; b) contacting the selected TMMP library member bound to the target T-cell with a fluorescently labeled binding agent that binds to the epitope tag, generating a selected TMMP library member/target T-cell/binding agent complex; and c) measuring the mean fluorescence intensity (MFI) of the selected TMMP library member/target T-cell/binding agent complex using flow cytometry, wherein the MFI measured over a range of concentrations of the selected TMMP library member provides a measure of the affinity and apparent avidity. A selected TMMP library member that selectively binds the target T cell, compared to binding of the TMMP library member to a control T cell that comprises: i) the cognate co-immunomodulatory polypeptide that binds the parental wild-type immunomodulatory polypeptide; and ii) a T-cell receptor that binds to an epitope other than the epitope present in the TMMP library member, is identified as selectively binding to the target T cell. In some cases, the binding agent is an antibody specific for the epitope tag. In some cases, the variant immunomodulatory polypeptide comprises from 1 to 20 amino acid substitutions (e.g., 1, 2, 3, 4, 5, 6, 7, 8, 9, 10, 11, 12, 13, 14, 15, 16, 17, 18, 19, or 20 amino acid substitutions) compared to the corresponding parental wild-type immunomodulatory polypeptide. In some cases, the TMMP comprises two variant immunomodulatory polypeptides. In some cases, the two variant immunomodulatory polypeptides comprise the same amino acid sequence. In some cases, the first polypeptide comprises one of the two variant immunomodulatory polypeptides and wherein the second polypeptide comprises the second of the two variant immunomodulatory polypeptides. In some cases, the two variant immunomodulatory polypeptides are on the same polypeptide chain of the TMMP. In some cases, the two variant immunomodulatory polypeptides are on the first polypeptide of the TMMP. In some cases, the two variant immunomodulatory polypeptides are on the second polypeptide of the TMMP.

[0327] In some cases, the method further comprises isolating the selected TMMP library member from the library. In some cases, the method further comprises providing a nucleic acid comprising a nucleotide sequence encoding the selected TMMP library member. In some cases, the nucleic acid is present in a recombinant expression vector. In some cases, the nucleotide sequence is operably linked to a transcriptional control element that is functional in a eukaryotic cell. In some cases, the method further comprises introducing the nucleic acid into a eukaryotic host cell, and culturing the cell in a liquid medium to synthesize the encoded selected TMMP library member in the cell. In some cases, the method further comprises isolating the synthesized selected TMMP library member from the cell or from liquid culture medium comprising the cell. In some cases, the selected TMMP library member comprises an Ig Fc polypeptide. In some cases, the method further comprises conjugating a drug to the Ig Fc polypeptide. In some cases, the drug is a cytotoxic agent is selected from maytansinoid, benzodiazepine, taxoid, CC-1065, duocarmycin, a duocarmycin analog, calicheamicin, dolastatin, a dolastatin analog, auristatin, tomaymycin, and leptomycin, or a pro-drug of any one of the foregoing. In some cases, the drug is a retinoid. In some cases, the parental wild-type immunomodulatory polypeptide and the cognate immunomodulatory polypeptides are selected from: IL-2 and IL-2 receptor; 4-1BBL and 4-1BB; PD-L1 and PD-1; CD70 and CD27; TGFβ and TGFβ receptor; CD80 and CD28; CD86 and CD28; OX40L and OX40; FasL and Fas; ICOS-L and ICOS; ICAM and LFA-1; JAG1 and Notch; JAG1 and CD46; CD80 and CTLA4; and CD86 and CTLA4.

[0328] The present disclosure provides a method of obtaining a TMMP comprising one or more variant immunomodulatory polypeptides that exhibit reduced affinity for a cognate co-immunomodulatory polypeptide compared to the affinity of the corresponding parental wild-type immunomodulatory polypeptide for the co-immunomodulatory polypeptide, the method comprising: A) providing a library of TMMPs comprising a plurality of members, wherein the plurality of member comprises: a) a first polypeptide comprising: i) an epitope; and ii) a first MHC polypeptide; and b) a second polypeptide comprising: i) a second MHC polypeptide; and ii) optionally an Ig Fc polypeptide or a non-Ig scaffold, wherein the members of the library comprise a plurality of variant immunomodulatory polypeptide present in the first polypeptide, the second polypeptide, or both the first and the second polypeptide; and B) selecting from the library a member that exhibits reduced affinity for the cognate co-immunomodulatory polypeptide. In some cases, the selecting step comprises determining the affinity, using bio-layer interferometry, of binding between TMMP library members and the cognate co-immunomodulatory polypeptide. In some cases, the TMMP is as described above.

[0329] In some cases, the method further comprises: a) contacting the selected TMMP library member with a target T-cell expressing on its surface: i) a cognate co-immunomodulatory polypeptide that binds the parental wild-type immunomodulatory polypeptide; and ii) a T-cell receptor that binds to the epitope, wherein the TMMP library member comprises an epitope tag, such that the TMMP library member binds to the target T-cell; b) contacting the selected TMMP library member bound to the target T-cell with a fluorescently labeled binding agent that binds to the epitope tag, generating a selected TMMP library member/target T-cell/binding agent complex; and c) measuring the mean fluorescence intensity (MFI) of the selected TMMP library member/target T-cell/binding agent complex using flow cytometry, wherein the MFI measured over a range of concentrations of the selected TMMP library member provides a measure of the affinity and apparent avidity. A selected TMMP library member that selectively binds the target T cell, compared to binding of the TMMP library member to a control T cell that comprises: i) the cognate co-immunomodulatory polypeptide that binds the parental wild-type immunomodulatory polypeptide; and ii) a T-cell receptor that binds to an epitope other than the epitope present in the TMMP library member, is identified as selectively binding to the target T cell. In some cases, the binding agent is an antibody specific for the epitope tag. In some cases, the variant immunomodulatory polypeptide comprises from 1 to 20 amino acid substitutions (e.g., 1, 2, 3, 4, 5, 6, 7, 8, 9, 10, 11, 12, 13, 14, 15, 16, 17, 18, 19, or 20 amino acid substitutions) compared to the corresponding parental wild-type immunomodulatory polypeptide. In some cases, the TMMP comprises two variant immunomodulatory polypeptides. In some cases, the two variant immunomodulatory polypeptides comprise the same amino acid sequence. In some cases, the first polypeptide comprises one of the two variant immunomodulatory polypeptides and wherein the second polypeptide comprises the second of the two variant immunomodulatory polypeptides. In some cases, the two variant immunomodulatory polypeptides are on the same polypeptide chain of the TMMP. In some cases, the two variant immunomodulatory polypeptides are on the first polypeptide of the TMMP. In some cases, the two variant immunomodulatory polypeptides are on the second polypeptide of the TMMP.

[0330] In some cases, the method further comprises isolating the selected TMMP library member from the library. In some cases, the method further comprises providing a nucleic acid comprising a nucleotide sequence encoding the selected TMMP library member. In some cases, the nucleic acid is present in a recombinant expression vector. In some cases, the nucleotide sequence is operably linked to a transcriptional control element that is functional in a eukaryotic cell. In some cases, the method further comprises introducing the nucleic acid into a eukaryotic host cell, and culturing the cell in a liquid medium to synthesize the encoded selected TMMP library member in the cell. In some cases, the method further comprises isolating the synthesized selected TMMP library member from the cell or from liquid culture medium comprising the cell. In some cases, the selected TMMP library member comprises an Ig Fc polypeptide. In some cases, the method further comprises conjugating a drug to the Ig Fc polypeptide. In some cases, the drug is a cytotoxic agent is selected from maytansinoid, benzodiazepine, taxoid, CC-1065, duocarmycin, a duocarmycin analog, calicheamicin, dolastatin, a dolastatin analog, auristatin, tomaymycin, and leptomycin, or a pro-drug of any one of the foregoing. In some cases, the drug is a retinoid. In some cases, the parental wild-type immunomodulatory polypeptide and the cognate immunomodulatory polypeptides are selected from IL-2 and IL-2 receptor; 4-1BBL and 4-1BB; PD-L1 and PD-1; TGFβ and TGFβ receptor; CD80 and CD28; CD86 and CD28; OX40L and OX40; FasL and Fas; ICOS-L and ICOS; CD70 and CD27; ICAM and LFA-1; JAG1 and Notch; JAG1 and CD46; CD80 and CTLA4; and CD86 and CTLA4.

### Nucleic Acids

[0331] The present disclosure provides a nucleic acid comprising a nucleotide sequence encoding a TMMP of the present disclosure. The present disclosure provides a nucleic acid comprising a nucleotide sequence encoding a TMMP of the present disclosure.

[0332] The present disclosure provides nucleic acids comprising nucleotide sequences encoding a TMMP of the present disclosure. In some cases, the individual polypeptide chains of a TMMP of the present disclosure are encoded in separate nucleic acids. In some cases, all polypeptide chains of a TMMP of the present disclosure are encoded in a single nucleic acid. In some cases, a first nucleic acid comprises a nucleotide sequence encoding a first polypeptide of a TMMP of the present disclosure; and a second nucleic acid comprises a nucleotide sequence encoding a second polypeptide of a TMMP of the present disclosure. In some cases, single nucleic acid comprises a nucleotide sequence encoding a first polypeptide of a TMMP of the present disclosure and a second polypeptide of a TMMP of the present disclosure.

### Separate Nucleic Acids Encoding Individual Polypeptide Chains of a Multimeric Polypeptide

[0333] The present disclosure provides nucleic acids comprising nucleotide sequences encoding a TMMP of the present disclosure. As noted above, in some cases, the individual polypeptide chains of a TMMP of the present disclosure are encoded in separate nucleic acids. In some cases, nucleotide sequences encoding the separate polypeptide chains of a TMMP of the present disclosure are operably linked to transcriptional control elements, e.g., promoters, such as promoters that are functional in a eukaryotic cell, where the promoter can be a constitutive promoter or an inducible promoter.

[0334] The present disclosure provides a first nucleic acid and a second nucleic acid, where the first nucleic acid comprises a nucleotide sequence encoding a first polypeptide of a TMMP of the present disclosure, where the first polypeptide comprises, in order from N-terminus to C-terminus: a) an epitope (e.g., a T-cell epitope); b) a first MHC polypeptide; and c) an immunomodulatory polypeptide (e.g., a reduced-affinity variant, as described above); and where the second nucleic acid comprises a nucleotide sequence encoding a second polypeptide of a TMMP of the present disclosure, where the second polypeptide comprises, in order from N-terminus to C-terminus: a) a second MHC polypeptide; and b) an Ig Fc polypeptide. Suitable T-cell epitopes, MHC polypeptides, immunomodulatory polypeptides, and Ig Fc polypeptides, are described above. In some cases, the nucleotide sequences encoding the first and the second polypeptides are operably linked to transcriptional control elements. In some cases, the transcriptional control element is a promoter that is functional in a eukaryotic cell. In some cases, the nucleic acids are present in separate expression vectors.

[0335] The present disclosure provides a first nucleic acid and a second nucleic acid, where the first nucleic acid comprises a nucleotide sequence encoding a first polypeptide of a TMMP of the present disclosure, where the first polypeptide comprises, in order from N-terminus to C-terminus: a) an epitope (e.g., a T-cell epitope); and b) a first MHC polypeptide; and where the second nucleic acid comprises a nucleotide sequence encoding a second polypeptide of a TMMP of the present disclosure, where the second polypeptide comprises, in order from N-terminus to C-terminus: a) an immunomodulatory polypeptide (e.g., a reduced-affinity variant as described above); b) a second MHC polypeptide; and c) an Ig Fc polypeptide. Suitable T-cell epitopes, MHC polypeptides, immunomodulatory polypeptides, and Ig Fc polypeptides, are described above. In some cases, the nucleotide sequences encoding the first and the second polypeptides are operably linked to transcriptional control elements. In some cases, the transcriptional control element is a promoter that is functional in a eukaryotic cell. In some cases, the nucleic acids are present in separate expression vectors.

### Nucleic Acid Encoding Two or More Polypeptides Present in a Multimeric Polypeptide

[0336] The present disclosure provides a nucleic acid comprising nucleotide sequences encoding at least the first polypeptide and the second polypeptide of a TMMP of the present disclosure. In some cases, where a TMMP of the present disclosure includes a first, second, and third polypeptide, the nucleic acid includes a nucleotide sequence encoding the first, second, and third polypeptides. In some cases, the nucleotide sequences encoding the first polypeptide and the second polypeptide of a TMMP of the present disclosure includes a proteolytically cleavable linker interposed between the nucleotide sequence encoding the first polypeptide and the nucleotide sequence encoding the second polypeptide. In some cases, the nucleotide sequences encoding the first polypeptide and the second polypeptide of a TMMP of the present disclosure includes an internal ribosome entry site (IRES) interposed between the nucleotide sequence encoding the first polypeptide and the nucleotide sequence encoding the second polypeptide. In some cases, the nucleotide sequences encoding the first polypeptide and the second polypeptide of a TMMP of the present disclosure includes a ribosome skipping signal (or cis-acting hydrolase element, CHYSEL) interposed between the nucleotide sequence encoding the first polypeptide and the nucleotide sequence encoding the second polypeptide. Examples of nucleic acids are described below, where a proteolytically cleavable linker is provided between nucleotide sequences encoding the first polypeptide and the second polypeptide of a TMMP of the present disclosure; in any of these embodiments, an IRES or a ribosome skipping signal can be used in place of the nucleotide sequence encoding the proteolytically cleavable linker.

[0337] In some cases, a first nucleic acid (e.g., a recombinant expression vector, an mRNA, a viral RNA, etc.) comprises a nucleotide sequence encoding a first polypeptide chain of a TMMP of the present disclosure; and a second nucleic acid (e.g., a recombinant expression vector, an mRNA, a viral RNA, etc.) comprises a nucleotide sequence encoding a second polypeptide chain of a TMMP of the present disclosure. In some cases, the nucleotide sequence encoding the first polypeptide, and the second nucleotide sequence encoding the second polypeptide, are each operably linked to transcriptional control elements, e.g., promoters, such as promoters that are functional in a eukaryotic cell, where the promoter can be a constitutive promoter or an inducible promoter.

[0338] The present disclosure provides a nucleic acid comprising a nucleotide sequence encoding a recombinant polypeptide, where the recombinant polypeptide comprises, in order from N-terminus to C-terminus: a) an epitope (e.g., a T-cell epitope); b) a first MHC polypeptide; c) an immunomodulatory polypeptide (e.g., a reduced-affinity variant as described above); d) a proteolytically cleavable linker; e) a second MHC polypeptide; and f) an immunoglobulin (Ig) Fc polypeptide. The present disclosure provides a nucleic acid comprising a nucleotide sequence encoding a recombinant polypeptide, where the recombinant polypeptide comprises, in order from N-terminus to C-terminus: a) a first leader peptide; b) the epitope; c) the first MHC polypeptide; d) the immunomodulatory polypeptide (e.g., a reduced-affinity variant as described above); e) the proteolytically cleavable linker; f) a second leader peptide; g) the second MHC polypeptide; and h) the Ig Fc polypeptide. The present disclosure provides a nucleic acid comprising a nucleotide sequence encoding a recombinant polypeptide, where the recombinant polypeptide comprises, in order from N-terminus to C-terminus: a) an epitope; b) a first MHC polypeptide; c) a proteolytically cleavable linker; d) an immunomodulatory polypeptide (e.g., a reduced-affinity variant as described above); e) a second MHC polypeptide; and f) an Ig Fc polypeptide. In some cases, the first leader peptide and the second leader peptide are a β2-M leader peptide. In some cases, the nucleotide sequence is operably linked to a transcriptional control element. In some cases, the transcriptional control element is a promoter that is functional in a eukaryotic cell.

[0339] Suitable MHC polypeptides are described above. In some cases, the first MHC polypeptide is a β2-microglobulin polypeptide; and wherein the second MHC polypeptide is an MHC class I heavy chain polypeptide. In some cases, the β2-microglobulin polypeptide comprises an amino acid sequence having at least 85% amino acid sequence identity to a 132M amino acid sequence depicted in FIG. 4. In some cases, the MHC class I heavy chain polypeptide is an HLA-A, HLA-B, HLA-C, HLA-E, HLA-F, HLA-G, HLA-K, or HLA-L heavy chain.

[0340] Suitable Fc polypeptides are described above. In some cases, the Ig Fc polypeptide is an IgG1 Fc polypeptide, an IgG2 Fc polypeptide, an IgG3 Fc polypeptide, an IgG4 Fc polypeptide, an IgA Fc polypeptide, or an IgM Fc polypeptide. In some cases, the Ig Fc polypeptide comprises an amino acid sequence having at least 85% amino acid sequence identity to an amino acid sequence depicted in FIGS. 3A-3G.

[0341] Suitable immunomodulatory polypeptides are described above.

[0342] Suitable proteolytically cleavable linkers are described above. In some cases, the proteolytically cleavable linker comprises an amino acid sequence selected from: a) LEVLFQGP (SEQ ID NO:388); b) ENLYTQS (SEQ ID NO:389); c) DDDDK (SEQ ID NO:390); d) LVPR (SEQ ID NO:391); and e) GSGATNFSLLKQAGDVEENPGP (SEQ ID NO:392).

[0343] In some cases, a linker between the epitope and the first MHC polypeptide comprises a first Cys residue, and the second MHC polypeptide comprises an amino acid substitution to provide a second Cys residue, such that the first and the second Cys residues provide for a disulfide linkage between the linker and the second MHC polypeptide. In some cases, first MHC polypeptide comprises an amino acid substitution to provide a first Cys residue, and the second MHC polypeptide comprises an amino acid substitution to provide a second Cys residue, such that the first Cys residue and the second Cys residue provide for a disulfide linkage between the first MHC polypeptide and the second MHC polypeptide.

### Recombinant Expression Vectors

[0344] The present disclosure provides recombinant expression vectors comprising nucleic acids of the present disclosure. In some cases, the recombinant expression vector is a non-viral vector. In some cases, the recombinant expression vector is a viral construct, e.g., a recombinant adeno-associated virus construct (see, e.g., U.S. Pat. No. 7,078,387), a recombinant adenoviral construct, a recombinant lentiviral construct, a recombinant retroviral construct, a non-integrating viral vector, etc.

[0345] Suitable expression vectors include, but are not limited to, viral vectors (e.g. viral vectors based on vaccinia virus; poliovirus; adenovirus (see, e.g., Li et al., Invest Opthalmol Vis Sci 35:2543 2549, 1994; Borras et al., Gene Ther 6:515 524, 1999; Li and Davidson, PNAS 92:7700 7704, 1995; Sakamoto et al., H Gene Ther 5:1088 1097, 1999; WO 94/12649, WO 93/03769; WO 93/19191; WO 94/28938; WO 95/11984 and WO 95/00655); adeno-associated virus (see, e.g., Ali et al., Hum Gene Ther 9:81 86, 1998, Flannery et al., PNAS 94:6916 6921, 1997; Bennett et al., Invest Opthalmol Vis Sci 38:2857 2863, 1997; Jomary et al., Gene Ther 4:683 690, 1997, Rolling et al., Hum Gene Ther 10:641 648, 1999; Ali et al., Hum Mol Genet 5:591 594, 1996; Srivastava in WO 93/09239, Samulski et al., J. Vir. (1989) 63:3822-3828; Mendelson et al., Virol. (1988) 166:154-165; and Flotte et al., PNAS (1993) 90:10613-10617); SV40; herpes simplex virus; human immunodeficiency virus (see, e.g., Miyoshi et al., PNAS 94:10319 23, 1997; Takahashi et al., J Virol 73:7812 7816, 1999); a retroviral vector (e.g., Murine Leukemia Virus, spleen necrosis virus, and vectors derived from retroviruses such as Rous Sarcoma Virus, Harvey Sarcoma Virus, avian leukosis virus, a lentivirus, human immunodeficiency virus, myeloproliferative sarcoma virus, and mammary tumor virus); and the like.

[0346] Numerous suitable expression vectors are known to those of skill in the art, and many are commercially available. The following vectors are provided by way of example; for eukaryotic host cells: pXT1, pSG5 (Stratagene), pSVK3, pBPV, pMSG, and pSVLSV40 (Pharmacia). However, any other vector may be used so long as it is compatible with the host cell.

[0347] Depending on the host/vector system utilized, any of a number of suitable transcription and translation control elements, including constitutive and inducible promoters, transcription enhancer elements, transcription terminators, etc. may be used in the expression vector (see e.g., Bitter et al. (1987) Methods in Enzymology, 153:516-544).

[0348] In some cases, a nucleotide sequence encoding a DNA-targeting RNA and/or a site-directed modifying polypeptide is operably linked to a control element, e.g., a transcriptional control element, such as a promoter. The transcriptional control element may be functional in either a eukaryotic cell, e.g., a mammalian cell; or a prokaryotic cell (e.g., bacterial or archaeal cell). In some cases, a nucleotide sequence encoding a DNA-targeting RNA and/or a site-directed modifying polypeptide is operably linked to multiple control elements that allow expression of the nucleotide sequence encoding a DNA-targeting RNA and/or a site-directed modifying polypeptide in both prokaryotic and eukaryotic cells.

[0349] Non-limiting examples of suitable eukaryotic promoters (promoters functional in a eukaryotic cell) include those from cytomegalovirus (CMV) immediate early, herpes simplex virus (HSV) thymidine kinase, early and late SV40, long terminal repeats (LTRs) from retrovirus, and mouse metallothionein-I. Selection of the appropriate vector and promoter is well within the level of ordinary skill in the art. The expression vector may also contain a ribosome binding site for translation initiation and a transcription terminator. The expression vector may also include appropriate sequences for amplifying expression.

### Genetically Modified Host Cells

[0350] The present disclosure provides a genetically modified host cell, where the host cell is genetically modified with a nucleic acid of the present disclosure.

[0351] Suitable host cells include eukaryotic cells, such as yeast cells, insect cells, and mammalian cells. In some cases, the host cell is a cell of a mammalian cell line. Suitable mammalian cell lines include human cell lines, non-human primate cell lines, rodent (e.g., mouse, rat) cell lines, and the like. Suitable mammalian cell lines include, but are not limited to, HeLa cells (e.g., American Type Culture Collection (ATCC) No. CCL-2), CHO cells (e.g., ATCC Nos. CRL9618, CCL61, CRL9096), 293 cells (e.g., ATCC No. CRL-1573), Vero cells, NIH 3T3 cells (e.g., ATCC No. CRL-1658), Huh-7 cells, BHK cells (e.g., ATCC No. CCL10), PC12 cells (ATCC No. CRL1721), COS cells, COS-7 cells (ATCC No. CRL1651), RAT1 cells, mouse L cells (ATCC No. CCLI.3), human embryonic kidney (HEK) cells (ATCC No. CRL1573), HLHepG2 cells, and the like.

[0352] In some cases, the host cell is a mammalian cell that has been genetically modified such that it does not synthesize endogenous MHC β2-M.

[0353] In some cases, the host cell is a mammalian cell that has been genetically modified such that it does not synthesize endogenous MHC Class I heavy chain. In some cases, the host cell is a mammalian cell that has been genetically modified such that it does not synthesize endogenous MHC β2-M and such that it does not synthesize endogenous MHC Class I heavy chain.

### Compositions

[0354] The present disclosure provides compositions, including pharmaceutical compositions, comprising a TMMP (synTac) of the present disclosure. The present disclosure provides compositions, including pharmaceutical compositions, comprising a TMMP of the present disclosure. The present disclosure provides compositions, including pharmaceutical compositions, comprising a nucleic acid or a recombinant expression vector of the present disclosure.

### Compositions Comprising a Multimeric Polypeptide

[0355] A composition of the present disclosure can comprise, in addition to a TMMP of the present disclosure, one or more of: a salt, e.g., NaCl, MgCl₂, KCl, MgSO₄, etc.; a buffering agent, e.g., a Tris buffer, N-(2-Hydroxyethyl)piperazine-N′-(2-ethanesulfonic acid) (HEPES), 2-(N-Morpholino)ethanesulfonic acid (MES), 2-(N-Morpholino)ethanesulfonic acid sodium salt (MES), 3-(N-Morpholino)propanesulfonic acid (MOPS), N-tris[Hydroxymethyl]methyl-3-aminopropanesulfonic acid (TAPS), etc.; a solubilizing agent; a detergent, e.g., a non-ionic detergent such as Tween-20, etc.; a protease inhibitor; glycerol; and the like.

[0356] The composition may comprise a pharmaceutically acceptable excipient, a variety of which are known in the art and need not be discussed in detail herein. Pharmaceutically acceptable excipients have been amply described in a variety of publications, including, for example, “Remington: The Science and Practice of Pharmacy”, 19^{th} Ed. (1995), or latest edition, Mack Publishing Co; A. Gennaro (2000) “Remington: The Science and Practice of Pharmacy”, 20th edition, Lippincott, Williams, & Wilkins; Pharmaceutical Dosage Forms and Drug Delivery Systems (1999) H. C. Ansel et al., eds 7^{th} ed., Lippincott, Williams, & Wilkins; and Handbook of Pharmaceutical Excipients (2000) A. H. Kibbe et al., eds., 3^{rd} ed. Amer. Pharmaceutical Assoc.

[0357] A pharmaceutical composition can comprise a TMMP of the present disclosure, and a pharmaceutically acceptable excipient. In some cases, a subject pharmaceutical composition will be suitable for administration to a subject, e.g., will be sterile. For example, in some cases, a subject pharmaceutical composition will be suitable for administration to a human subject, e.g., where the composition is sterile and is free of detectable pyrogens and/or other toxins.

[0358] The protein compositions may comprise other components, such as pharmaceutical grades of mannitol, lactose, starch, magnesium stearate, sodium saccharin, talcum, cellulose, glucose, sucrose, magnesium, carbonate, and the like. The compositions may contain pharmaceutically acceptable auxiliary substances as required to approximate physiological conditions such as pH adjusting and buffering agents, toxicity adjusting agents and the like, for example, sodium acetate, sodium chloride, potassium chloride, calcium chloride, sodium lactate, hydrochloride, sulfate salts, solvates (e.g., mixed ionic salts, water, organics), hydrates (e.g., water), and the like.

[0359] For example, compositions may include aqueous solution, powder form, granules, tablets, pills, suppositories, capsules, suspensions, sprays, and the like. The composition may be formulated according to the various routes of administration described below.

[0360] Where a TMMP of the present disclosure is administered as an injectable (e.g. subcutaneously, intraperitoneally, intramuscularly, and/or intravenously) directly into a tissue, a formulation can be provided as a ready-to-use dosage form, or as non-aqueous form (e.g. a reconstitutable storage-stable powder) or aqueous form, such as liquid composed of pharmaceutically acceptable carriers and excipients. The protein-containing formulations may also be provided so as to enhance serum half-life of the TMMP following administration. For example, the TMMP may be provided in a liposome formulation, prepared as a colloid, or other conventional techniques for extending serum half-life. A variety of methods are available for preparing liposomes, as described in, e.g., Szoka et al. 1980 Ann. Rev. Biophys. Bioeng. 9:467, U.S. Pat. Nos. 4,235,871, 4,501,728 and 4,837,028. The preparations may also be provided in controlled release or slow-release forms.

[0361] Other examples of formulations suitable for parenteral administration include isotonic sterile injection solutions, anti-oxidants, bacteriostats, and solutes that render the formulation isotonic with the blood of the intended recipient, suspending agents, solubilizers, thickening agents, stabilizers, and preservatives. For example, a subject pharmaceutical composition can be present in a container, e.g., a sterile container, such as a syringe. The formulations can be presented in unit-dose or multi-dose sealed containers, such as ampules and vials, and can be stored in a freeze-dried (lyophilized) condition requiring only the addition of the sterile liquid excipient, for example, water, for injections, immediately prior to use. Extemporaneous injection solutions and suspensions can be prepared from sterile powders, granules, and tablets.

[0362] The concentration of a TMMP of the present disclosure in a formulation can vary widely (e.g., from less than about 0.1%, usually at or at least about 2% to as much as 20% to 50% or more by weight) and will usually be selected primarily based on fluid volumes, viscosities, and patient-based factors in accordance with the particular mode of administration selected and the patient's needs.

[0363] The present disclosure provides a container comprising a composition of the present disclosure, e.g., a liquid composition. The container can be, e.g., a syringe, an ampoule, and the like. In some cases, the container is sterile. In some cases, both the container and the composition are sterile.

[0364] The present disclosure provides compositions, including pharmaceutical compositions, comprising a TMMP of the present disclosure. A composition can comprise: a) a TMMP of the present disclosure; and b) an excipient, as described above. In some cases, the excipient is a pharmaceutically acceptable excipient.

[0365] In some cases, a TMMP of the present disclosure is present in a liquid composition. Thus, the present disclosure provides compositions (e.g., liquid compositions, including pharmaceutical compositions) comprising a TMMP of the present disclosure. In some cases, a composition of the present disclosure comprises: a) a TMMP of the present disclosure; and b) saline (e.g., 0.9% NaCl). In some cases, the composition is sterile. In some cases, the composition is suitable for administration to a human subject, e.g., where the composition is sterile and is free of detectable pyrogens and/or other toxins. Thus, the present disclosure provides a composition comprising: a) a TMMP of the present disclosure; and b) saline (e.g., 0.9% NaCl), where the composition is sterile and is free of detectable pyrogens and/or other toxins.

### Compositions Comprising a Nucleic Acid or a Recombinant Expression Vector

[0366] The present disclosure provides compositions, e.g., pharmaceutical compositions, comprising a nucleic acid or a recombinant expression vector of the present disclosure. A wide variety of pharmaceutically acceptable excipients is known in the art and need not be discussed in detail herein. Pharmaceutically acceptable excipients have been amply described in a variety of publications, including, for example, A. Gennaro (2000) “Remington: The Science and Practice of Pharmacy”, 20th edition, Lippincott, Williams, & Wilkins; Pharmaceutical Dosage Forms and Drug Delivery Systems (1999) H. C. Ansel et al., eds 7^{th} ed., Lippincott, Williams, & Wilkins; and Handbook of Pharmaceutical Excipients (2000) A. H. Kibbe et al., eds., 3^{rd} ed. Amer. Pharmaceutical Assoc.

[0367] A composition of the present disclosure can include: a) one or more nucleic acids or one or more recombinant expression vectors comprising nucleotide sequences encoding a TMMP; and b) one or more of: a buffer, a surfactant, an antioxidant, a hydrophilic polymer, a dextrin, a chelating agent, a suspending agent, a solubilizer, a thickening agent, a stabilizer, a bacteriostatic agent, a wetting agent, and a preservative. Suitable buffers include, but are not limited to, (such as N,N-bis(2-hydroxyethyl)-2-aminoethanesulfonic acid (BES), bis(2-hydroxyethyl)amino-tris(hydroxymethyl)methane (BIS-Tris), N-(2-hydroxyethyl)piperazine-N′3-propanesulfonic acid (EPPS or HEPPS), glycylglycine, N-2-hydroxyehtylpiperazine-N′-2-ethanesulfonic acid (HEPES), 3-(N-morpholino)propane sulfonic acid (MOPS), piperazine-N,N′-bis(2-ethane-sulfonic acid) (PIPES), sodium bicarbonate, 3-(N-tris(hydroxymethyl)-methyl-amino)-2-hydroxy-propanesulfonic acid) TAPSO, (N-tris(hydroxymethyl)methyl-2-aminoethanesulfonic acid (TES), N-tris(hydroxymethyl)methyl-glycine (Tricine), tris(hydroxymethyl)-aminomethane (Tris), etc.). Suitable salts include, e.g., NaCl, MgCl₂, KCl, MgSO₄, etc.

[0368] A pharmaceutical formulation of the present disclosure can include a nucleic acid or recombinant expression vector of the present disclosure in an amount of from about 0.001% to about 90% (w/w). In the description of formulations, below, “subject nucleic acid or recombinant expression vector” will be understood to include a nucleic acid or recombinant expression vector of the present disclosure. For example, in some cases, a subject formulation comprises a nucleic acid or recombinant expression vector of the present disclosure.

[0369] A subject nucleic acid or recombinant expression vector can be admixed, encapsulated, conjugated or otherwise associated with other compounds or mixtures of compounds; such compounds can include, e.g., liposomes or receptor-targeted molecules. A subject nucleic acid or recombinant expression vector can be combined in a formulation with one or more components that assist in uptake, distribution and/or absorption.

[0370] A subject nucleic acid or recombinant expression vector composition can be formulated into any of many possible dosage forms such as, but not limited to, tablets, capsules, gel capsules, liquid syrups, soft gels, suppositories, and enemas. A subject nucleic acid or recombinant expression vector composition can also be formulated as suspensions in aqueous, non-aqueous or mixed media. Aqueous suspensions may further contain substances which increase the viscosity of the suspension including, for example, sodium carboxymethylcellulose, sorbitol and/or dextran. The suspension may also contain stabilizers.

[0371] A formulation comprising a subject nucleic acid or recombinant expression vector can be a liposomal formulation. As used herein, the term “liposome” means a vesicle composed of amphiphilic lipids arranged in a spherical bilayer or bilayers. Liposomes are unilamellar or multilamellar vesicles which have a membrane formed from a lipophilic material and an aqueous interior that contains the composition to be delivered. Cationic liposomes are positively charged liposomes that can interact with negatively charged DNA molecules to form a stable complex. Liposomes that are pH sensitive or negatively charged are believed to entrap DNA rather than complex with it. Both cationic and noncationic liposomes can be used to deliver a subject nucleic acid or recombinant expression vector.

[0372] Liposomes also include “sterically stabilized” liposomes, a term which, as used herein, refers to liposomes comprising one or more specialized lipids that, when incorporated into liposomes, result in enhanced circulation lifetimes relative to liposomes lacking such specialized lipids. Examples of sterically stabilized liposomes are those in which part of the vesicle-forming lipid portion of the liposome comprises one or more glycolipids or is derivatized with one or more hydrophilic polymers, such as a polyethylene glycol (PEG) moiety. Liposomes and their uses are further described in U.S. Pat. No. 6,287,860, which is incorporated herein by reference in its entirety.

[0373] The formulations and compositions of the present disclosure may also include surfactants. The use of surfactants in drug products, formulations and in emulsions is well known in the art. Surfactants and their uses are further described in U.S. Pat. No. 6,287,860.

[0374] In one embodiment, various penetration enhancers are included, to effect the efficient delivery of nucleic acids. In addition to aiding the diffusion of non-lipophilic drugs across cell membranes, penetration enhancers also enhance the permeability of lipophilic drugs. Penetration enhancers may be classified as belonging to one of five broad categories, i.e., surfactants, fatty acids, bile salts, chelating agents, and non-chelating non-surfactants. Penetration enhancers and their uses are further described in U.S. Pat. No. 6,287,860, which is incorporated herein by reference in its entirety.

[0375] Compositions and formulations for oral administration include powders or granules, microparticulates, nanoparticulates, suspensions or solutions in water or non-aqueous media, capsules, gel capsules, sachets, tablets, or minitablets. Thickeners, flavoring agents, diluents, emulsifiers, dispersing aids or binders may be desirable. Suitable oral formulations include those in which a subject antisense nucleic acid is administered in conjunction with one or more penetration enhancers surfactants and chelators. Suitable surfactants include, but are not limited to, fatty acids and/or esters or salts thereof, bile acids and/or salts thereof. Suitable bile acids/salts and fatty acids and their uses are further described in U.S. Pat. No. 6,287,860. Also suitable are combinations of penetration enhancers, for example, fatty acids/salts in combination with bile acids/salts. An exemplary suitable combination is the sodium salt of lauric acid, capric acid, and UDCA. Further penetration enhancers include, but are not limited to, polyoxyethylene-9-lauryl ether, and polyoxyethylene-20-cetyl ether. Suitable penetration enhancers also include propylene glycol, dimethylsulfoxide, triethanoiamine, N,N-dimethylacetamide, N,N-dimethylformamide, 2-pyrrolidone and derivatives thereof, tetrahydrofurfuryl alcohol, and AZONE™.

### Methods of Modulating T Cell Activity

[0376] The present disclosure provides a method of selectively modulating the activity of an epitope-specific T cell, the method comprising contacting the T cell with a TMMP of the present disclosure, where contacting the T cell with a TMMP of the present disclosure selectively modulates the activity of the epitope-specific T cell. In some cases, the contacting occurs in vitro. In some cases, the contacting occurs in vivo. In some cases, the contacting occurs ex vivo.

[0377] In some cases, e.g., where the target T cell is a CD8⁺ T cell, the TMMP comprises Class I MHC polypeptides (e.g., β2-microglobulin and Class I MHC heavy chain).

[0378] Where a TMMP of the present disclosure includes an immunomodulatory polypeptide that is an activating polypeptide, contacting the T cell with the TMMP activates the epitope-specific T cell. In some instances, the epitope-specific T cell is a T cell that is specific for an epitope present on a cancer cell, and contacting the epitope-specific T cell with the TMMP increases cytotoxic activity of the T cell toward the cancer cell. In some instances, the epitope-specific T cell is a T cell that is specific for an epitope present on a cancer cell, and contacting the epitope-specific T cell with the TMMP increases the number of the epitope-specific T cells.

[0379] In some instances, the epitope-specific T cell is a T cell that is specific for an epitope present on a virus-infected cell, and contacting the epitope-specific T cell with the TMMP increases cytotoxic activity of the T cell toward the virus-infected cell. In some instances, the epitope-specific T cell is a T cell that is specific for an epitope present on a virus-infected cell, and contacting the epitope-specific T cell with the TMMP increases the number of the epitope-specific T cells.

[0380] Where a TMMP of the present disclosure includes an immunomodulatory polypeptide that is an inhibiting polypeptide, contacting the T cell with the TMMP inhibits the epitope-specific T cell. In some instances, the epitope-specific T cell is a self-reactive T cell that is specific for an epitope present in a self antigen, and the contacting reduces the number of the self-reactive T cells.

[0381] The present disclosure provides a method of modulating an immune response in an individual, the method comprising administering to the individual an effective amount of a TMMP of the present disclosure. Administering the TMMP induces an epitope-specific T cell response (e.g., cancer epitope-specific T-cell response; a virus epitope-specific) and an epitope-non-specific T cell response, where the ratio of the epitope-specific T cell response to the epitope-non-specific T cell response is at least 2:1. In some cases, the ratio of the epitope-specific T cell response to the epitope-non-specific T cell response is at least 5:1. In some cases, the ratio of the epitope-specific T cell response to the epitope-non-specific T cell response is at least 10:1. In some cases, the ratio of the epitope-specific T cell response to the epitope-non-specific T cell response is at least 25:1. In some cases, the ratio of the epitope-specific T cell response to the epitope-non-specific T cell response is at least 50:1. In some cases, the ratio of the epitope-specific T cell response to the epitope-non-specific T cell response is at least 100:1. In some cases, the individual is a human. In some cases, the modulating increases a cytotoxic T-cell response to a cancer cell, e.g., a cancer cell expressing an antigen that displays the same epitope displayed by the peptide epitope present in the TMMP. In some cases, the administering is intravenous, subcutaneous, intramuscular, systemic, intralymphatic, distal to a treatment site, local, or at or near a treatment site.

[0382] The present disclosure provides a method of delivering a costimulatory (i.e., immunomodulatory) polypeptide selectively to target T cell, the method comprising contacting a mixed population of T cells with a TMMP of the present disclosure, where the mixed population of T cells comprises the target T cell and non-target T cells, where the target T cell is specific for the epitope present within the TMMP (e.g., where the target T cell is specific for the epitope present within the TMMP), and where the contacting step delivers the one or more costimulatory polypeptides (immunomodulatory polypeptides) present within the TMMP to the target T cell. In some cases, the population of T cells is in vitro. In some cases, the population of T cells is in vivo in an individual. In some cases, the method comprises administering the TMMP to the individual. In some case, the T cell is a cytotoxic T cell. In some cases, the mixed population of T cells is an in vitro population of mixed T cells obtained from an individual, and the contacting step results in activation and/or proliferation of the target T cell, generating a population of activated and/or proliferated target T cells; in some of these instances, the method further comprises administering the population of activated and/or proliferated target T cells to the individual.

[0383] The present disclosure provides a method of detecting, in a mixed population of T cells obtained from an individual, the presence of a target T cell that binds an epitope of interest (e.g., a cancer epitope, a virus epitope), the method comprising: a) contacting in vitro the mixed population of T cells with a TMMP of the present disclosure, wherein the TMMP comprises the epitope of interest (e.g., the cancer epitope, the virus epitope); and b) detecting activation and/or proliferation of T cells in response to said contacting, wherein activated and/or proliferated T cells indicates the presence of the target T cell.

### Treatment Methods

[0384] The present disclosure provides a method of treatment of an individual, the method comprising administering to the individual an amount of a TMMP of the present disclosure, or one or more nucleic acids encoding the TMMP, effective to treat the individual. Also provided is a TMMP of the present disclosure for use in a method of treatment of the human or animal body. In some cases, a treatment method of the present disclosure comprises administering to an individual in need thereof one or more recombinant expression vectors comprising nucleotide sequences encoding a TMMP of the present disclosure. In some cases, a treatment method of the present disclosure comprises administering to an individual in need thereof one or more mRNA molecules comprising nucleotide sequences encoding a TMMP of the present disclosure. In some cases, a treatment method of the present disclosure comprises administering to an individual in need thereof a TMMP of the present disclosure. Conditions that can be treated include, e.g., cancer and autoimmune disorders, as described below.

[0385] In some cases, a TMMP of the present disclosure, when administered to an individual in need thereof, induces both an epitope-specific T cell response and an epitope non-specific T cell response. In other words, in some cases, a TMMP of the present disclosure, when administered to an individual in need thereof, induces an epitope-specific T cell response by modulating the activity of a first T cell that displays both: i) a TCR specific for the epitope present in the TMMP; ii) a co-immunomodulatory polypeptide that binds to the immunomodulatory polypeptide present in the TMMP; and induces an epitope non-specific T cell response by modulating the activity of a second T cell that displays: i) a TCR specific for an epitope other than the epitope present in the TMMP; and ii) a co-immunomodulatory polypeptide that binds to the immunomodulatory polypeptide present in the TMMP. The ratio of the epitope-specific T cell response to the epitope-non-specific T cell response is at least 2:1, at least 5:1, at least 10:1, at least 15:1, at least 20:1, at least 25:1, at least 50:1, or at least 100:1. The ratio of the epitope-specific T cell response to the epitope-non-specific T cell response is from about 2:1 to about 5:1, from about 5:1 to about 10:1, from about 10:1 to about 15:1, from about 15:1 to about 20:1, from about 20:1 to about 25:1, from about 25:1 to about 50:1, or from about 50:1 to about 100:1, or more than 100:1. “Modulating the activity” of a T cell can include one or more of: i) activating a cytotoxic (e.g., CD8⁺) T cell; ii) inducing cytotoxic activity of a cytotoxic (e.g., CD8⁺) T cell; iii) inducing production and release of a cytotoxin (e.g., a perforin; a granzyme; a granulysin) by a cytotoxic (e.g., CD8⁺) T cell; iv) inhibiting activity of an autoreactive T cell; and the like.

[0386] The combination of the reduced affinity of the immunomodulatory polypeptide for its cognate co-immunomodulatory polypeptide, and the affinity of the epitope for a TCR, provides for enhanced selectivity of a TMMP of the present disclosure. Thus, for example, a TMMP of the present disclosure binds with higher avidity to a first T cell that displays both: i) a TCR specific for the epitope present in the TMMP; and ii) a co-immunomodulatory polypeptide that binds to the immunomodulatory polypeptide present in the TMMP, compared to the avidity to which it binds to a second T cell that displays: i) a TCR specific for an epitope other than the epitope present in the TMMP; and ii) a co-immunomodulatory polypeptide that binds to the immunomodulatory polypeptide present in the TMMP.

[0387] The present disclosure provides a method of selectively modulating the activity of an epitope-specific T cell in an individual, the method comprising administering to the individual an effective amount of a TMMP of the present disclosure, or one or more nucleic acids (e.g., expression vectors; mRNA; etc.) comprising nucleotide sequences encoding the TMMP, where the TMMP selectively modulates the activity of the epitope-specific T cell in the individual. Selectively modulating the activity of an epitope-specific T cell can treat a disease or disorder in the individual. Thus, the present disclosure provides a treatment method comprising administering to an individual in need thereof an effective amount of a TMMP of the present disclosure.

[0388] In some cases, the immunomodulatory polypeptide (“MOD”) is an activating polypeptide, and the TMMP activates the epitope-specific T cell. In some cases, the epitope is a cancer-associated epitope, and the TMMP increases the activity of a T cell specific for the cancer-associate epitope. In some cases, the MOD is an activating polypeptide, and the TMMP activates an epitope-specific T-cell. In some cases, the T cells are T-helper cells (CD4⁺ cells), cytotoxic T-cells (CD8⁺ cells), or NK-T-cells. In some cases, the epitope is a cancer epitope, and the TMMP increases the activity of a T-cell specific for a cancer cell expressing the cancer epitope (e.g., T-helper cells (CD4⁺ cells), cytotoxic T-cells (CD8⁺ cells), and/or NK-T-cells). Activation of CD4⁺ T cells can include increasing proliferation of CD4⁺ T cells and/or inducing or enhancing release cytokines by CD4⁺ T cells. Activation of NK-T-cells and/or CD8⁺ cells can include: increasing proliferation of NK-T-cells and/or CD8⁺ cells; and/or inducing release of cytokines such as interferon γ by NK-T-cells and/or CD8⁺ cells. In some cases, a TMMP of the present disclosure reduces proliferation and/or activity of a regulatory T (Treg) cell. Tregs are FoxP3⁺, CD4⁺ T cells. In some cases, e.g., where a TMMP of the present disclosure comprises an inhibitory immunomodulatory polypeptide (e.g., PD-L1, FasL, and the like), the TMMP reduces the proliferation and/or activity of a Treg.

[0389] Where a TMMP of the present disclosure comprises a cancer peptide epitope, the TMMP can be administered to an individual in need thereof to treat a cancer in the individual, where the cancer expresses the cancer peptide epitope present in the TMMP. The present disclosure provides a method of treating cancer in an individual, the method comprising administering to the individual an effective amount of a TMMP of the present disclosure, or one or more nucleic acids (e.g., expression vectors; mRNA; etc.) comprising nucleotide sequences encoding the TMMP, where the TMMP comprises a T-cell epitope that is a cancer epitope, and where the TMMP comprises a stimulatory immunomodulatory polypeptide. In some cases, an “effective amount” of a TMMP of the present disclosure is an amount that, when administered in one or more doses to an individual in need thereof, reduces the number of cancer cells in the individual. For example, in some cases, an “effective amount” of a TMMP of the present disclosure is an amount that, when administered in one or more doses to an individual in need thereof, reduces the number of cancer cells in the individual by at least 10%, at least 15%, at least 20%, at least 25%, at least 30%, at least 40%, at least 50%, at least 60%, at least 70%, at least 80%, at least 90%, or at least 95%, compared to the number of cancer cells in the individual before administration of the TMMP, or in the absence of administration with the TMMP. In some cases, an “effective amount” of a TMMP of the present disclosure is an amount that, when administered in one or more doses to an individual in need thereof, reduces the number of cancer cells in the individual to undetectable levels.

[0390] In some cases, an “effective amount” of a TMMP of the present disclosure is an amount that, when administered in one or more doses to an individual in need thereof, reduces the tumor mass in the individual. For example, in some cases, an “effective amount” of a TMMP of the present disclosure is an amount that, when administered in one or more doses to an individual in need thereof (an individual having a tumor), reduces the tumor mass in the individual by at least 10%, at least 15%, at least 20%, at least 25%, at least 30%, at least 40%, at least 50%, at least 60%, at least 70%, at least 80%, at least 90%, or at least 95%, compared to the tumor mass in the individual before administration of the TMMP, or in the absence of administration with the TMMP. In some cases, an “effective amount” of a TMMP of the present disclosure is an amount that, when administered in one or more doses to an individual in need thereof (an individual having a tumor), reduces the tumor volume in the individual. For example, in some cases, an “effective amount” of a TMMP of the present disclosure is an amount that, when administered in one or more doses to an individual in need thereof (an individual having a tumor), reduces the tumor volume in the individual by at least 10%, at least 15%, at least 20%, at least 25%, at least 30%, at least 40%, at least 50%, at least 60%, at least 70%, at least 80%, at least 90%, or at least 95%, compared to the tumor volume in the individual before administration of the TMMP, or in the absence of administration with the TMMP. In some cases, an “effective amount” of a TMMP of the present disclosure is an amount that, when administered in one or more doses to an individual in need thereof, increases survival time of the individual. For example, in some cases, an “effective amount” of a TMMP of the present disclosure is an amount that, when administered in one or more doses to an individual in need thereof, increases survival time of the individual by at least 1 month, at least 2 months, at least 3 months, from 3 months to 6 months, from 6 months to 1 year, from 1 year to 2 years, from 2 years to 5 years, from 5 years to 10 years, or more than 10 years, compared to the expected survival time of the individual in the absence of administration with the TMMP.

[0391] In some instances, the epitope-specific T cell is a T cell that is specific for an epitope present on a virus-infected cell, and contacting the epitope-specific T cell with the TMMP increases cytotoxic activity of the T cell toward the virus-infected cell. In some instances, the epitope-specific T cell is a T cell that is specific for an epitope present on a virus-infected cell, and contacting the epitope-specific T cell with the TMMP increases the number of the epitope-specific T cells.

[0392] Thus, the present disclosure provides a method of treating a virus infection in an individual, the method comprising administering to the individual an effective amount of a TMMP of the present disclosure, or one or more nucleic acids comprising nucleotide sequences encoding the TMMP, where the TMMP comprises a T-cell epitope that is a viral epitope, and where the TMMP comprises a stimulatory immunomodulatory polypeptide. In some cases, an “effective amount” of a TMMP is an amount that, when administered in one or more doses to an individual in need thereof, reduces the number of virus-infected cells in the individual. For example, in some cases, an “effective amount” of a TMMP of the present disclosure is an amount that, when administered in one or more doses to an individual in need thereof, reduces the number of virus-infected cells in the individual by at least 10%, at least 15%, at least 20%, at least 25%, at least 30%, at least 40%, at least 50%, at least 60%, at least 70%, at least 80%, at least 90%, or at least 95%, compared to the number of virus-infected cells in the individual before administration of the TMMP, or in the absence of administration with the TMMP. In some cases, an “effective amount” of a TMMP of the present disclosure is an amount that, when administered in one or more doses to an individual in need thereof, reduces the number of virus-infected cells in the individual to undetectable levels.

[0393] Thus, the present disclosure provides a method of treating an infection in an individual, the method comprising administering to the individual an effective amount of a TMMP of the present disclosure, or one or more nucleic acids comprising nucleotide sequences encoding the TMMP, where the TMMP comprises a T-cell epitope that is a pathogen-associated epitope, and where the TMMP comprises a stimulatory immunomodulatory polypeptide. In some cases, an “effective amount” of a TMMP of the present disclosure is an amount that, when administered in one or more doses to an individual in need thereof, reduces the number of pathogens in the individual. For example, in some cases, an “effective amount” of a TMMP of the present disclosure is an amount that, when administered in one or more doses to an individual in need thereof, reduces the number of pathogens in the individual by at least 10%, at least 15%, at least 20%, at least 25%, at least 30%, at least 40%, at least 50%, at least 60%, at least 70%, at least 80%, at least 90%, or at least 95%, compared to the number of pathogens in the individual before administration of the TMMP, or in the absence of administration with the TMMP. In some cases, an “effective amount” of a TMMP of the present disclosure is an amount that, when administered in one or more doses to an individual in need thereof, reduces the number of pathogens in the individual to undetectable levels. Pathogens include viruses, bacteria, protozoans, and the like.

[0394] In some cases, the immunomodulatory polypeptide is an inhibitory polypeptide, and the TMMP inhibits activity of the epitope-specific T cell. In some cases, the epitope is a self-epitope, and the TMMP selectively inhibits the activity of a T cell specific for the self-epitope.

[0395] The present disclosure provides a method of treating an autoimmune disorder in an individual, the method comprising administering to the individual an effective amount of a TMMP of the present disclosure, or one or more nucleic acids comprising nucleotide sequences encoding the TMMP, where the TMMP comprises a T-cell epitope that is a self epitope, and where the TMMP comprises an inhibitory immunomodulatory polypeptide. In some cases, an “effective amount” of a TMMP of the present disclosure is an amount that, when administered in one or more doses to an individual in need thereof, reduces the number self-reactive T cells by at least 10%, at least 15%, at least 20%, at least 25%, at least 30%, at least 40%, at least 50%, at least 60%, at least 70%, at least 80%, at least 90%, or at least 95%, compared to number of self-reactive T cells in the individual before administration of the TMMP, or in the absence of administration with the TMMP. In some cases, an “effective amount” of a TMMP is an amount that, when administered in one or more doses to an individual in need thereof, reduces production of Th2 cytokines in the individual. In some cases, an “effective amount” of a TMMP of the present disclosure is an amount that, when administered in one or more doses to an individual in need thereof, ameliorates one or more symptoms associated with an autoimmune disease in the individual.

[0396] As noted above, in some cases, in carrying out a subject treatment method, a TMMP of the present disclosure is administered to an individual in need thereof, as the TMMP per se. In other instances, in carrying out a subject treatment method, one or more nucleic acids comprising nucleotide sequences encoding a TMMP of the present disclosure is/are administering to an individual in need thereof. Thus, in other instances, one or more nucleic acids of the present disclosure, e.g., one or more recombinant expression vectors of the present disclosure, is/are administered to an individual in need thereof.

### Formulations

[0397] Suitable formulations are described above, where suitable formulations include a pharmaceutically acceptable excipient. In some cases, a suitable formulation comprises: a) a TMMP of the present disclosure; and b) a pharmaceutically acceptable excipient. In some cases, a suitable formulation comprises: a) a nucleic acid comprising a nucleotide sequence encoding a TMMP of the present disclosure; and b) a pharmaceutically acceptable excipient; in some instances, the nucleic acid is an mRNA. In some cases, a suitable formulation comprises: a) a first nucleic acid comprising a nucleotide sequence encoding the first polypeptide of a TMMP of the present disclosure; b) a second nucleic acid comprising a nucleotide sequence encoding the second polypeptide of a TMMP of the present disclosure; and c) a pharmaceutically acceptable excipient. In some cases, a suitable formulation comprises: a) a recombinant expression vector comprising a nucleotide sequence encoding a TMMP of the present disclosure; and b) a pharmaceutically acceptable excipient. In some cases, a suitable formulation comprises: a) a first recombinant expression vector comprising a nucleotide sequence encoding the first polypeptide of a TMMP of the present disclosure; b) a second recombinant expression vector comprising a nucleotide sequence encoding the second polypeptide of a TMMP of the present disclosure; and c) a pharmaceutically acceptable excipient.

[0398] Suitable pharmaceutically acceptable excipients are described above.

### Dosages

[0399] A suitable dosage can be determined by an attending physician or other qualified medical personnel, based on various clinical factors. As is well known in the medical arts, dosages for any one patient depend upon many factors, including the patient's size, body surface area, age, the particular polypeptide or nucleic acid to be administered, sex of the patient, time, and route of administration, general health, and other drugs being administered concurrently. A TMMP of the present disclosure may be administered in amounts between 1 ng/kg body weight and 20 mg/kg body weight per dose, e.g. between 0.1 mg/kg body weight to 10 mg/kg body weight, e.g. between 0.5 mg/kg body weight to 5 mg/kg body weight; however, doses below or above this exemplary range are envisioned, especially considering the aforementioned factors. If the regimen is a continuous infusion, it can also be in the range of 1 μg to 10 mg per kilogram of body weight per minute. A TMMP of the present disclosure can be administered in an amount of from about 1 mg/kg body weight to 50 mg/kg body weight, e.g., from about 1 mg/kg body weight to about 5 mg/kg body weight, from about 5 mg/kg body weight to about 10 mg/kg body weight, from about 10 mg/kg body weight to about 15 mg/kg body weight, from about 15 mg/kg body weight to about 20 mg/kg body weight, from about 20 mg/kg body weight to about 25 mg/kg body weight, from about 25 mg/kg body weight to about 30 mg/kg body weight, from about 30 mg/kg body weight to about 35 mg/kg body weight, from about 35 mg/kg body weight to about 40 mg/kg body weight, or from about 40 mg/kg body weight to about 50 mg/kg body weight.

[0400] In some cases, a suitable dose of a TMMP of the present disclosure is from 0.01 μg to 100 g per kg of body weight, from 0.1 μg to 10 g per kg of body weight, from 1 μg to 1 g per kg of body weight, from 10 μg to 100 mg per kg of body weight, from 100 μg to 10 mg per kg of body weight, or from 100 μg to 1 mg per kg of body weight. Persons of ordinary skill in the art can easily estimate repetition rates for dosing based on measured residence times and concentrations of the administered agent in bodily fluids or tissues. Following successful treatment, it may be desirable to have the patient undergo maintenance therapy to prevent the recurrence of the disease state, wherein a TMMP of the present disclosure is administered in maintenance doses, ranging from 0.01 μg to 100 g per kg of body weight, from 0.1 μg to 10 g per kg of body weight, from 1 μg to 1 g per kg of body weight, from 10 μg to 100 mg per kg of body weight, from 100 μg to 10 mg per kg of body weight, or from 100 μg to 1 mg per kg of body weight.

[0401] Those of skill will readily appreciate that dose levels can vary as a function of the specific TMMP, the severity of the symptoms and the susceptibility of the subject to side effects. Preferred dosages for a given compound are readily determinable by those of skill in the art by a variety of means.

[0402] In some cases, multiple doses of a TMMP of the present disclosure, a nucleic acid of the present disclosure, or a recombinant expression vector of the present disclosure are administered. The frequency of administration of a TMMP of the present disclosure, a nucleic acid of the present disclosure, or a recombinant expression vector of the present disclosure can vary depending on any of a variety of factors, e.g., severity of the symptoms, etc. For example, in some cases, a TMMP of the present disclosure, a nucleic acid of the present disclosure, or a recombinant expression vector of the present disclosure is administered once per month, twice per month, three times per month, every other week (qow), once per week (qw), twice per week (biw), three times per week (tiw), four times per week, five times per week, six times per week, every other day (qod), daily (qd), twice a day (qid), or three times a day (tid).

[0403] The duration of administration of a TMMP of the present disclosure, a nucleic acid of the present disclosure, or a recombinant expression vector of the present disclosure, e.g., the period of time over which a TMMP of the present disclosure, a nucleic acid of the present disclosure, or a recombinant expression vector of the present disclosure is administered, can vary, depending on any of a variety of factors, e.g., patient response, etc. For example, a TMMP of the present disclosure, a nucleic acid of the present disclosure, or a recombinant expression vector of the present disclosure can be administered over a period of time ranging from about one day to about one week, from about two weeks to about four weeks, from about one month to about two months, from about two months to about four months, from about four months to about six months, from about six months to about eight months, from about eight months to about 1 year, from about 1 year to about 2 years, or from about 2 years to about 4 years, or more.

### Routes of Administration

[0404] An active agent (a TMMP of the present disclosure, a nucleic acid of the present disclosure, or a recombinant expression vector of the present disclosure) is administered to an individual using any available method and route suitable for drug delivery, including in vivo and ex vivo methods, as well as systemic and localized routes of administration.

[0405] Conventional and pharmaceutically acceptable routes of administration include intratumoral, peritumoral, intramuscular, intralymphatic, intratracheal, intracranial, subcutaneous, intradermal, topical application, intravenous, intraarterial, rectal, nasal, oral, and other enteral and parenteral routes of administration. Routes of administration may be combined, if desired, or adjusted depending upon the TMMP and/or the desired effect. A TMMP of the present disclosure, or a nucleic acid or recombinant expression vector of the present disclosure, can be administered in a single dose or in multiple doses.

[0406] In some cases, a TMMP of the present disclosure, a nucleic acid of the present disclosure, or a recombinant expression vector of the present disclosure is administered intravenously. In some cases, a TMMP of the present disclosure, a nucleic acid of the present disclosure, or a recombinant expression vector of the present disclosure is administered intramuscularly. In some cases, a TMMP of the present disclosure, a nucleic acid of the present disclosure, or a recombinant expression vector of the present disclosure is administered intralymphatically. In some cases, a TMMP of the present disclosure, a nucleic acid of the present disclosure, or a recombinant expression vector of the present disclosure is administered locally. In some cases, a TMMP of the present disclosure, a nucleic acid of the present disclosure, or a recombinant expression vector of the present disclosure is administered intratumorally. In some cases, a TMMP of the present disclosure, a nucleic acid of the present disclosure, or a recombinant expression vector of the present disclosure is administered peritumorally. In some cases, a TMMP of the present disclosure, a nucleic acid of the present disclosure, or a recombinant expression vector of the present disclosure is administered intracranially. In some cases, a TMMP of the present disclosure, a nucleic acid of the present disclosure, or a recombinant expression vector of the present disclosure is administered subcutaneously.

[0407] In some cases, a TMMP of the present disclosure is administered intravenously. In some cases, a TMMP of the present disclosure is administered intramuscularly. In some cases, a TMMP of the present disclosure is administered locally. In some cases, a TMMP the present disclosure is administered intratumorally. In some cases, a TMMP of the present disclosure is administered peritumorally. In some cases, a TMMP of the present disclosure is administered intracranially. In some cases, a TMMP is administered subcutaneously. In some cases, a TMMP of the present disclosure is administered intralymphatically.

[0408] A TMMP of the present disclosure, a nucleic acid of the present disclosure, or a recombinant expression vector of the present disclosure can be administered to a host using any available conventional methods and routes suitable for delivery of conventional drugs, including systemic or localized routes. In general, routes of administration contemplated for use in a method of the present disclosure include, but are not necessarily limited to, enteral, parenteral, and inhalational routes.

[0409] Parenteral routes of administration other than inhalation administration include, but are not necessarily limited to, topical, transdermal, subcutaneous, intramuscular, intraorbital, intracapsular, intraspinal, intrasternal, intratumoral, intralymphatic, peritumoral, and intravenous routes, i.e., any route of administration other than through the alimentary canal. Parenteral administration can be carried to effect systemic or local delivery of a TMMP of the present disclosure, a nucleic acid of the present disclosure, or a recombinant expression vector of the present disclosure. Where systemic delivery is desired, administration typically involves invasive or systemically absorbed topical or mucosal administration of pharmaceutical preparations.

### Combination Therapies

[0410] In some cases, a method of the present disclosure for treating cancer in an individual comprises: a) administering a TMMP of the present disclosure; and b) administering at least one additional therapeutic agent or therapeutic treatment. Suitable additional therapeutic agents include, but are not limited to, a small molecule cancer chemotherapeutic agent, and an immune checkpoint inhibitor. Suitable additional therapeutic treatments include, e.g., radiation, surgery (e.g., surgical resection of a tumor), and the like.

[0411] A treatment method of the present disclosure can comprise co-administration of a TMMP of the present disclosure and at least one additional therapeutic agent. By “co-administration” is meant that both a TMMP of the present disclosure and at least one additional therapeutic agent are administered to an individual, although not necessarily at the same time, in order to achieve a therapeutic effect that is the result of having administered both the TMMP and the at least one additional therapeutic agent. The administration of the TMMP and the at least one additional therapeutic agent can be substantially simultaneous, e.g., the TMMP can be administered to an individual within about 1 minute to about 24 hours (e.g., within about 1 minute, within about 5 minutes, within about 15 minutes, within about 30 minutes, within about 1 hour, within about 4 hours, within about 8 hours, within about 12 hours, or within about 24 hours) of administration of the at least one additional therapeutic agent. In some cases, a TMMP of the present disclosure is administered to an individual who is undergoing treatment with, or who has undergone treatment with, the at least one additional therapeutic agent. The administration of the TMMP can occur at different times and/or at different frequencies.

[0412] As an example, a treatment method of the present disclosure can comprise co-administration of a TMMP of the present disclosure and an immune checkpoint inhibitor such as an antibody specific for an immune checkpoint. By “co-administration” is meant that both a TMMP of the present disclosure and an immune checkpoint inhibitor (e.g., an antibody specific for an immune checkpoint polypeptide) are administered to an individual, although not necessarily at the same time, in order to achieve a therapeutic effect that is the result of having administered both the TMMP and the immune checkpoint inhibitor (e.g., an antibody specific for an immune checkpoint polypeptide). The administration of the TMMP and the immune checkpoint inhibitor (e.g., an antibody specific for an immune checkpoint polypeptide) can be substantially simultaneous, e.g., the TMMP can be administered to an individual within about 1 minute to about 24 hours (e.g., within about 1 minute, within about 5 minutes, within about 15 minutes, within about 30 minutes, within about 1 hour, within about 4 hours, within about 8 hours, within about 12 hours, or within about 24 hours) of administration of the immune checkpoint inhibitor (e.g., an antibody specific for an immune checkpoint polypeptide). In some cases, a TMMP of the present disclosure is administered to an individual who is undergoing treatment with, or who has undergone treatment with, an immune checkpoint inhibitor (e.g., an antibody specific for an immune checkpoint polypeptide). The administration of the TMMP and the immune checkpoint inhibitor (e.g., an antibody specific for an immune checkpoint polypeptide) can occur at different times and/or at different frequencies.

[0413] Exemplary immune checkpoint inhibitors include inhibitors that target an immune checkpoint polypeptide such as CD27, CD28, CD40, CD122, CD96, CD73, CD47, OX40, GITR, CSF1R, JAK, PI3K delta, PI3K gamma, TAM, arginase, CD137 (also known as 4-1BB), ICOS, A2AR, B7-H3, B7-H4, BTLA, CTLA-4, LAG3, TIM3, VISTA, CD96, TIGIT, CD122, PD-1, PD-L1 and PD-L2. In some cases, the immune checkpoint polypeptide is a stimulatory checkpoint molecule selected from CD27, CD28, CD40, ICOS, OX40, GITR, CD122 and CD137. In some cases, the immune checkpoint polypeptide is an inhibitory checkpoint molecule selected from A2AR, B7-H3, B7-H4, BTLA, CTLA-4, IDO, KIR, LAG3, PD-1, TIM3, CD96, TIGIT and VISTA.

[0414] In some cases, the immune checkpoint inhibitor is an antibody specific for an immune checkpoint polypeptide. In some cases, the anti-immune checkpoint antibody is a monoclonal antibody. In some cases, the anti-immune checkpoint antibody is humanized, or de-immunized such that the antibody does not substantially elicit an immune response in a human. In some cases, the anti-immune checkpoint antibody is a humanized monoclonal antibody. In some cases, the anti-immune checkpoint antibody is a de-immunized monoclonal antibody. In some cases, the anti-immune checkpoint antibody is a fully human monoclonal antibody. In some cases, the anti-immune checkpoint antibody inhibits binding of the immune checkpoint polypeptide to a ligand for the immune checkpoint polypeptide. In some cases, the anti-immune checkpoint antibody inhibits binding of the immune checkpoint polypeptide to a receptor for the immune checkpoint polypeptide.

[0415] Suitable anti-immune checkpoint antibodies include, but are not limited to, nivolumab (Bristol-Myers Squibb), pembrolizumab (Merck), pidilizumab (Curetech), AMP-224 (GlaxoSmithKline/Amplimmune), MPDL3280A (Roche), MDX-1105 (Medarex, Inc./Bristol Myer Squibb), MEDI-4736 (Medimmune/AstraZeneca), arelumab (Merck Serono), ipilimumab (YERVOY, (Bristol-Myers Squibb), tremelimumab (Pfizer), pidilizumab (CureTech, Ltd.), IMP321 (Immutep S.A.), MGA271 (Macrogenics), BMS-986016 (Bristol-Meyers Squibb), lirilumab (Bristol-Myers Squibb), urelumab (Bristol-Meyers Squibb), PF-05082566 (Pfizer), IPH2101 (Innate Pharma/Bristol-Myers Squibb), MEDI-6469 (MedImmune/AZ), CP-870,893 (Genentech), Mogamulizumab (Kyowa Hakko Kirin), Varlilumab (CelIDex Therapeutics), Avelumab (EMD Serono), Galiximab (Biogen Idec), AMP-514 (Amplimmune/AZ), AUNP 12 (Aurigene and Pierre Fabre), Indoximod (NewLink Genetics), NLG-919 (NewLink Genetics), INCB024360 (Incyte); KN035; and combinations thereof. For example, in some cases, the immune checkpoint inhibitor is an anti-PD-1 antibody. Suitable anti-PD-1 antibodies include, e.g., nivolumab, pembrolizumab (also known as MK-3475), pidilizumab, SHR-1210, PDR001, and AMP-224. In some cases, the anti-PD-1 monoclonal antibody is nivolumab, pembrolizumab or PDR001. Suitable anti-PD1 antibodies are described in U.S. Patent Publication No. 2017/0044259. For pidilizumab, see, e.g., Rosenblatt et al. (2011) J. Immunother. 34:409-18. In some cases, the immune checkpoint inhibitor is an anti-CTLA-4 antibody. In some cases, the anti-CTLA-4 antibody is ipilimumab or tremelimumab. For tremelimumab, see, e.g., Ribas et al. (2013) J. Clin. Oncol. 31:616-22. In some cases, the immune checkpoint inhibitor is an anti-PD-L1 antibody. In some cases, the anti-PD-L1 monoclonal antibody is BMS-935559, MEDI4736, MPDL3280A (also known as RG7446), KN035, or MSB0010718C. In some embodiments, the anti-PD-L1 monoclonal antibody is MPDL3280A (atezolizumab) or MEDI4736 (durvalumab). For durvalumab, see, e.g., WO 2011/066389. For atezolizumab, see, e.g., U.S. Pat. No. 8,217,149.

### Subjects Suitable for Treatment

[0416] Subjects suitable for treatment with a method of the present disclosure include individuals who have cancer, including individuals who have been diagnosed as having cancer, individuals who have been treated for cancer but who failed to respond to the treatment, and individuals who have been treated for cancer and who initially responded but subsequently became refractory to the treatment. Subjects suitable for treatment with a method of the present disclosure include individuals who have an infection (e.g., an infection with a pathogen such as a bacterium, a virus, a protozoan, etc.), including individuals who have been diagnosed as having an infection, and individuals who have been treated for an infection but who failed to respond to the treatment. Subjects suitable for treatment with a method of the present disclosure include individuals who have bacterial infection, including individuals who have been diagnosed as having a bacterial infection, and individuals who have been treated for a bacterial infection but who failed to respond to the treatment. Subjects suitable for treatment with a method of the present disclosure include individuals who have a viral infection, including individuals who have been diagnosed as having a viral infection, and individuals who have been treated for a viral infection but who failed to respond to the treatment. Subjects suitable for treatment with a method of the present disclosure include individuals who have an autoimmune disease, including individuals who have been diagnosed as having an autoimmune disease, and individuals who have been treated for an autoimmune disease but who failed to respond to the treatment.

### Examples of Non-Limiting Aspects of the Disclosure

[0417] Aspects, including embodiments, of the present subject matter described above may be beneficial alone or in combination, with one or more other aspects or embodiments. Without limiting the foregoing description, certain non-limiting aspects of the disclosure numbered 1-95 are provided below. As will be apparent to those of skill in the art upon reading this disclosure, each of the individually numbered aspects may be used or combined with any of the preceding or following individually numbered aspects. This is intended to provide support for all such combinations of aspects and is not limited to combinations of aspects explicitly provided below:

[0418] Aspect 1. A T-cell modulatory multimeric polypeptide comprising: at least one heterodimer comprising: a) a first polypeptide comprising: i) a peptide epitope, wherein the peptide has a length of at least 4 amino acids; and ii) first major histocompatibility complex (MHC) polypeptide; b) a second polypeptide comprising a second MHC polypeptide, and c) at least one immunomodulatory polypeptide, wherein the first and/or the second polypeptide comprises the immunomodulatory polypeptide.

[0419] Aspect 2. T-cell modulatory multimeric polypeptide of aspect 1, wherein at least one of the one or more immunomodulatory domains is a variant immunomodulatory polypeptide that exhibits reduced affinity to a cognate co-immunomodulatory polypeptide compared to the affinity of a corresponding wild-type immunomodulatory polypeptide for the cognate co-immunomodulatory polypeptide, and wherein the epitope binds to a T-cell receptor (TCR) on a T cell with an affinity of at least 10⁻⁷ M, such that: i) the T-cell modulatory multimeric polypeptide binds to a first T cell with an affinity that is at least 25% higher than the affinity with which the T-cell modulatory multimeric polypeptide binds a second T cell, wherein the first T cell expresses on its surface the cognate co-immunomodulatory polypeptide and a TCR that binds the epitope with an affinity of at least 10⁻⁷M, and wherein the second T cell expresses on its surface the cognate co-immunomodulatory polypeptide but does not express on its surface a TCR that binds the epitope with an affinity of at least 10⁻⁷ M; and/or ii) the ratio of the binding affinity of a control T-cell modulatory multimeric polypeptide, wherein the control comprises a wild-type immunomodulatory polypeptide, to a cognate co-immunomodulatory polypeptide to the binding affinity of the T-cell modulatory multimeric polypeptide comprising a variant of the wild-type immunomodulatory polypeptide to the cognate co-immunomodulatory polypeptide, when measured by bio-layer interferometry, is in a range of from 1.5:1 to 10⁶:1.

[0420] Aspect 3. A T-cell modulatory multimeric polypeptide of aspect 2, wherein: a) the T-cell modulatory multimeric polypeptide binds to the first T cell with an affinity that is at least 50%, at least 2-fold, at least 5-fold, or at least 10-fold higher than the affinity with which it binds the second T cell; and/or b) the variant immunomodulatory polypeptide binds the co-immunomodulatory polypeptide with an affinity of from about 10⁻⁴ M to about 10⁻⁷ M, from about 10⁻⁴ M to about 10⁻⁶M, from about 10⁻⁴ M to about 10⁻⁵ M; and/or c) wherein the ratio of the binding affinity of a control T-cell modulatory multimeric polypeptide, wherein the control comprises a wild-type immunomodulatory polypeptide, to a cognate co-immunomodulatory polypeptide to the binding affinity of the T-cell modulatory multimeric polypeptide comprising a variant of the wild-type immunomodulatory polypeptide to the cognate co-immunomodulatory polypeptide, when measured by bio-layer interferometry, is at least 10:1, at least 50:1, at least 10²:1, or at least 10³:1.

[0421] Aspect 4. A T-cell modulatory multimeric polypeptide of any one of aspects 1-3, wherein the first or the second polypeptide comprises an immunoglobulin (Ig) Fc polypeptide.

[0422] Aspect 5. A T-cell modulatory multimeric polypeptide of aspect 4, wherein the Ig Fc polypeptide is an IgG1 Fc polypeptide.

[0423] Aspect 6. A T-cell modulatory multimeric polypeptide of aspect 5, wherein IgG1 Fc polypeptide comprises one or more amino acid substitutions selected from N297A, L234A, L235A, L234F, L235E, and P331S.

[0424] Aspect 7. A T-cell modulatory multimeric polypeptide of any one of aspects 1-6, wherein:

[0425] a1) the first polypeptide comprises, in order from N-terminus to C-terminus: i) the peptide epitope; ii) the first MHC polypeptide; and iii) at least one immunomodulatory polypeptide; and b1) the second polypeptide comprises, in order from N-terminus to C-terminus: i) the second MHC polypeptide; and ii) an immunoglobulin (Ig) Fc polypeptide; or

[0426] a2) the first polypeptide comprises, in order from N-terminus to C-terminus: i) the peptide epitope; and ii) the first MHC polypeptide; and b2) the second polypeptide comprises, in order from N-terminus to C-terminus: i) at least one immunomodulatory polypeptide; ii) the second MHC polypeptide; and iii) an Ig Fc polypeptide; or

[0427] a3) the first polypeptide comprises, in order from N-terminus to C-terminus: i) the peptide epitope; and ii) the first MHC polypeptide; and b3) the second polypeptide comprises, in order from N-terminus to C-terminus: i) the second MHC polypeptide; and ii) an Ig Fc polypeptide; and iii) at least one immunomodulatory polypeptide; or

[0428] a4) the first polypeptide comprises, in order from N-terminus to C-terminus: i) the peptide epitope; and ii) the first MHC polypeptide; and b4) the second polypeptide comprises, in order from N-terminus to C-terminus: i) the second MHC polypeptide; and ii) at least one immunomodulatory polypeptide; or

[0429] a5) the first polypeptide comprises, in order from N-terminus to C-terminus: i) the peptide epitope; and ii) the first MHC polypeptide; and b5) a second polypeptide comprises, in order from N-terminus to C-terminus: i) at least one immunomodulatory polypeptide; and ii) the second MHC polypeptide; or

[0430] a6) the first polypeptide comprises, in order from N-terminus to C-terminus: i) the peptide epitope; ii) the first MHC polypeptide; and iii) at least one immunomodulatory polypeptide; and b6) the second polypeptide comprises: i) the second MHC polypeptide.

[0431] Aspect 8. A T-cell modulatory multimeric polypeptide of any one of aspects 1-7, wherein the first polypeptide comprises a peptide linker between the epitope and the first MHC polypeptide and/or wherein the second polypeptide comprises a peptide linker between the immunomodulatory polypeptide and the second MHC polypeptide.

[0432] Aspect 9. A T-cell modulatory multimeric polypeptide of aspect 8, wherein the peptide linker comprises the amino acid sequence (GGGGS)n, where n is an integer from 1 to 10.

[0433] Aspect 10. A T-cell modulatory multimeric polypeptide of any one of aspects 1-9, wherein the first MHC polypeptide is a β2-microglobulin polypeptide; and wherein the second MHC polypeptide is an MHC class I heavy chain polypeptide.

[0434] Aspect 11. A T-cell modulatory multimeric polypeptide of any one of aspects 1-10, wherein the at least one immunomodulatory polypeptide is selected from the group consisting of a cytokine (e.g., an IL2 polypeptide, an IL7 polypeptide, an IL12 polypeptide, an IL15 polypeptide, an IL17 polypeptide, an IL21 polypeptide, an IL27 polypeptide, an IL-23 polypeptide, a TGFβ polypeptide, and the like; and including all family members, e.g., IL17A, IL-17B, IL-17C, IL-17D, IL-17E, IL-17F, IL-17E), a 4-1BBL polypeptide, an ICOS-L polypeptide, an OX-40L polypeptide, a CD80 polypeptide, a CD86 polypeptide, a CD40 polypeptide, a CD70 polypeptide, a JAG1 (CD339) polypeptide, an ICAM (CD540 polypeptide, a PD-L1 polypeptide, a FasL polypeptide, a PD-L2 polypeptide, a PD-1H (VISTA) polypeptide, an ICOS-L (CD275) polypeptide, a GITRL polypeptide, an HVEM polypeptide, a CXCL10 polypeptide, a CXCL9 polypeptide, a CXCL11 polypeptide, a CXCL13 polypeptide, and a CX3CL1 polypeptide, a Galectin-9 polypeptide, a CD83 polypeptide, a CD30L polypeptide, a HLA-G polypeptide, a MICA polypeptide, a MICB polypeptide, a HVEM (CD270) polypeptide, a lymphotoxin beta receptor polypeptide, a 3/TR6 polypeptide, an ILT3 polypeptide, an ILT4 polypeptide, a CXCL10 polypeptide, a CXCL9 polypeptide, a CXCL11 polypeptide, a CXCL13 polypeptide, and a CX3CL1 polypeptide, and combinations thereof.

[0435] Aspect 12. A T-cell modulatory multimeric polypeptide of any one of aspects 1-11, wherein the at least one immunomodulatory polypeptide is an IL-2 polypeptide.

[0436] Aspect 13. A T-cell modulatory multimeric polypeptide of any one of aspects 1-12, wherein the multimeric polypeptide comprises at least two immunomodulatory polypeptides, and wherein at least two of the immunomodulatory polypeptides are the same.

[0437] Aspect 14. A T-cell modulatory multimeric polypeptide of aspect 13, wherein the 2 or more immunomodulatory polypeptides are in tandem.

[0438] Aspect 15. A T-cell modulatory multimeric polypeptide of any one of aspects 1-14, wherein the first polypeptide and the second polypeptide are covalently linked to one another.

[0439] Aspect 16. A T-cell modulatory multimeric polypeptide of aspect 15, wherein the covalent linkage is via a disulfide bond.

[0440] Aspect 17. A T-cell modulatory multimeric polypeptide of any one of aspects 1-16, wherein the first MHC polypeptide or a linker between the epitope and the first MHC polypeptide comprises an amino acid substitution to provide a first Cys residue, wherein the second MHC polypeptide comprises an amino acid substitution to provide a second Cys residue, and wherein the disulfide linkage is between the first and the second Cys residues.

[0441] Aspect 18. A T-cell modulatory multimeric polypeptide of any one of aspects 1-17, wherein the peptide epitope has a length of from about 4 amino acids to about 25 amino acids.

[0442] Aspect 19. A T-cell modulatory multimeric polypeptide of any one of aspects 1-18, wherein the peptide epitope is a cancer epitope.

[0443] Aspect 20. A T-cell modulatory multimeric polypeptide of any one of aspects 1-18, wherein the peptide epitope is a viral epitope.

[0444] Aspect 21. A T-cell modulatory multimeric polypeptide of any one of aspects 1-20, wherein the first or the second MHC polypeptide comprises: a) an amino acid sequence having at least 95% amino acid sequence identity to the HLA-A*0101, HLA-A*0201, HLA-A*0201, HLA-A*1101, HLA-A*2301, HLA-A*2402, HLA-A*2407, HLA-A*3303, or HLA-A*3401 amino acid sequence depicted in FIG. 7A; or b) an amino acid sequence having at least 95% amino acid sequence identity to the HLA-B*0702, HLA-B*0801, HLA-B*1502, HLA-B*3802, HLA-B*4001, HLA-B*4601, or HLA-B*5301 amino acid sequence depicted in FIG. 8A; or c) an amino acid sequence having at least 95% amino acid sequence identity to the HLA-C*0102, HLA-C*0303, HLA-C*0304, HLA-C*0401, HLA-C*0602, HLA-C*0701, HLA-C*0702, HLA-C*0801, or HLA-C*1502 depicted in FIG. 9A.

[0445] Aspect 22. A T-cell modulatory multimeric polypeptide of any one of aspects 1-20, wherein the first MHC polypeptide is a β2M polypeptide, and wherein the second MHC polypeptide comprises an amino acid sequence having at least 95% amino acid sequence identity to an HLA-A*2402 polypeptide.

[0446] Aspect 23. A T-cell modulatory multimeric polypeptide of any one of aspects 1-20, wherein the first MHC polypeptide is a β2M polypeptide, and wherein the second MHC polypeptide is an HLA-A*1101 polypeptide.

[0447] Aspect 24. A T-cell modulatory multimeric polypeptide of any one of aspects 1-20, wherein the first MHC polypeptide is a β2M polypeptide, and wherein the second MHC polypeptide comprises an amino acid sequence having at least 95% amino acid sequence identity to an HLA-A*3303 polypeptide.

[0448] Aspect 25. A T-cell modulatory multimeric polypeptide of any one of aspects 1-20, wherein the first MHC polypeptide is a β2M polypeptide, and wherein the second MHC polypeptide comprises an amino acid sequence having at least 95% amino acid sequence identity to an HLA-A*0201 polypeptide.

[0449] Aspect 26. A T-cell modulatory multimeric polypeptide of any one of aspects 21-25, wherein the MHC heavy chain polypeptide comprises a Cys at position 236.

[0450] Aspect 27. A T-cell modulatory multimeric polypeptide of any one of aspects 21-26, wherein the β2M polypeptide comprises a Cys at position 12.

[0451] Aspect 28. A T-cell modulatory multimeric polypeptide of any one of aspects 1-27, wherein the immunomodulatory polypeptide is a variant IL-2 polypeptide comprising: i) an H16A substitution and an F42A substation; or ii) an H16T substitution and an F42A substitution.

[0452] Aspect 29. A T-cell modulatory multimeric polypeptide of any one of aspects 1-28, wherein the multimeric polypeptide comprises a first and a second heterodimer, and wherein the first and second heterodimers are covalently bound by one or more disulfide bonds between the Ig Fc polypeptides of the first and second heterodimers.

[0453] Aspect 30. A nucleic acid comprising a nucleotide sequence encoding a first or second polypeptide according to any one of aspects 1-28, wherein the first or second polypeptide comprises at least one immunomodulatory domain

[0454] Aspect 31. An expression vector comprising the nucleic acid of aspect 30.

[0455] Aspect 32. A method of selectively modulating the activity of T cell specific for a given epitope, the method comprising contacting the T cell with a T-cell modulatory multimeric polypeptide according to any one of aspects 1-29, wherein said contacting selectively modulates the activity of the epitope-specific T cell.

[0456] Aspect 33. A method of treating a patient having a cancer, the method comprising administering to the patient an effective amount of a pharmaceutical composition comprising T-cell modulatory multimeric polypeptide according to any one of aspects 1-29.

[0457] Aspect 34. The method of aspect 33, wherein the cancer is cervical cancer, prostate cancer, or ovarian cancer.

[0458] Aspect 35. The method of aspect 33 or 34, wherein said administering is intramuscular.

[0459] Aspect 36. The method of aspect 33 or 34, wherein said administering is intravenous.

[0460] Aspect 37. A method of modulating an immune response in an individual, the method comprising administering to the individual an effective amount of the T-cell modulatory multimeric polypeptide (TMMP) of any one of aspects 12927, wherein said administering induces an epitope-specific T cell response (e.g., a T cell response specific for the epitope present in the TMMP) and an epitope-non-specific T cell response, wherein the ratio of the epitope-specific T cell response to the epitope-non-specific T cell response is at least 2:1.

[0461] Aspect 38. The method of aspect 37, wherein the ratio of the epitope-specific T cell response to the epitope-non-specific T cell response is at least 5:1.

[0462] Aspect 39. The method of aspect 37, wherein the ratio of the epitope-specific T cell response to the epitope-non-specific T cell response is at least 10:1.

[0463] Aspect 40. The method of aspect 37, wherein the ratio of the epitope-specific T cell response to the epitope-non-specific T cell response is at least 25:1.

[0464] Aspect 41. The method of aspect 37, wherein the ratio of the epitope-specific T cell response to the epitope-non-specific T cell response is at least 50:1.

[0465] Aspect 42. The method of aspect 37, wherein the ratio of the epitope-specific T cell response to the epitope-non-specific T cell response is at least 100:1.

[0466] Aspect 43. The method of any one of aspects 37-42, wherein the individual is a human.

[0467] Aspect 44. The method of any one of aspects 37-43, wherein said modulating comprises increasing a cytotoxic T-cell response to a cancer cell (e.g., a cancer cell expressing the peptide epitope present in the TMMP).

[0468] Aspect 45. The method of any one of aspects 37-44, wherein said administering is intravenous, subcutaneous, intramuscular, systemic, intralymphatic, distal to a treatment site, local, or at or near a treatment site.

[0469] Aspect 47. The method of any one of aspects 37-45, wherein the epitope non-specific T-cell response is less than the epitope non-specific T-cell response that would be induced by a control T-cell modulatory multimeric polypeptide comprising a corresponding wild-type immunomodulatory polypeptide.

[0470] Aspect 48. A method of delivering a costimulatory (i.e., immunomodulatory) polypeptide selectively to target T cell, the method comprising contacting a mixed population of T cells with a T-cell modulatory multimeric polypeptide (TMMP) of any one of aspects 1-29, wherein the mixed population of T cells comprises the target T cell and non-target T cells, wherein the target T cell is specific for the epitope present within the TMMP (e.g., wherein the target T cell is specific for the epitope present within the TMMP), and wherein said contacting delivers the one or more costimulatory polypeptides present within the TMMP to the target T cell.

[0471] Aspect 49. The method of aspect 48, wherein the population of T cells is in vitro.

[0472] Aspect 50. The method of aspect 48, wherein the population of T cells is in vivo in an individual.

[0473] Aspect 51. The method of aspect 50, comprising administering the multimeric polypeptide to the individual.

[0474] Aspect 52. The method of any one of aspects 48-51, wherein the target T cell is a cytotoxic T cell.

[0475] Aspect 53. The method of aspect 48, wherein the mixed population of T cells is an in vitro population of mixed T cells obtained from an individual, and wherein said contacting results in activation and/or proliferation of the target T cell, generating a population of activated and/or proliferated target T cells.

[0476] Aspect 54. The method of aspect 53, further comprising administering the population of activated and/or proliferated target T cells to the individual.

[0477] Aspect 55. A method of detecting, in a mixed population of T cells obtained from an individual, the presence of a target T cell that binds an epitope of interest, the method comprising: a) contacting in vitro the mixed population of T cells with T-cell modulatory multimeric polypeptide (TMMP) of any one of aspects 1-29, wherein the TMMP comprises the epitope of interest; and b) detecting activation and/or proliferation of T cells in response to said contacting, wherein activated and/or proliferated T cells indicates the presence of the target T cell.

[0478] Aspect 56. A T-cell modulatory multimeric polypeptide comprising: at least one heterodimer comprising: a) a first polypeptide comprising: i) a peptide epitope, wherein the peptide has a length of from about 4 amino acids to about 25 amino acids; and ii) first major histocompatibility complex (MHC) class I polypeptide; b) a second polypeptide comprising a second MHC class I polypeptide, and c) at least one immunomodulatory polypeptide, wherein the first and/or the second polypeptide comprises the immunomodulatory polypeptide, and wherein the first and the second polypeptides are covalently linked to one another via at least 2 disulfide bonds.

[0479] Aspect 57. A T-cell modulatory multimeric polypeptide of aspect 56, wherein at least one of the at least one immunomodulatory polypeptides is a variant immunomodulatory polypeptide that exhibits reduced affinity to a cognate co-immunomodulatory polypeptide compared to the affinity of a corresponding wild-type immunomodulatory polypeptide for the cognate co-immunomodulatory polypeptide, and wherein the epitope binds to a T-cell receptor (TCR) on a T cell with an affinity of at least 10⁻⁷ M, such that: i) the T-cell modulatory multimeric polypeptide binds to a first T cell with an affinity that is at least 25% higher than the affinity with which the T-cell modulatory multimeric polypeptide binds a second T cell, wherein the first T cell expresses on its surface the cognate co-immunomodulatory polypeptide and a TCR that binds the epitope with an affinity of at least 10⁻⁷ M, and wherein the second T cell expresses on its surface the cognate co-immunomodulatory polypeptide but does not express on its surface a TCR that binds the epitope with an affinity of at least 10⁻⁷ M; and/or ii) the ratio of the binding affinity of a control T-cell modulatory multimeric polypeptide, wherein the control comprises a wild-type immunomodulatory polypeptide, to a cognate co-immunomodulatory polypeptide to the binding affinity of the T-cell modulatory multimeric polypeptide comprising a variant of the wild-type immunomodulatory polypeptide to the cognate co-immunomodulatory polypeptide, when measured by bio-layer interferometry, is in a range of from 1.5:1 to 10⁶:1.

[0480] Aspect 58. A T-cell modulatory multimeric polypeptide of aspect 57, wherein: a) the T-cell modulatory multimeric polypeptide binds to the first T cell with an affinity that is at least 50%, at least 2-fold, at least 5-fold, or at least 10-fold higher than the affinity with which it binds the second T cell; and/or b) the variant immunomodulatory polypeptide binds the co-immunomodulatory polypeptide with an affinity of from about 10⁻⁴ M to about 10⁻⁷ M, from about 10⁻⁴ M to about 10⁻⁶ M, from about 10⁻⁴ M to about 10⁻⁵ M; and/or c) wherein the ratio of the binding affinity of a control T-cell modulatory multimeric polypeptide, wherein the control comprises a wild-type immunomodulatory polypeptide, to a cognate co-immunomodulatory polypeptide to the binding affinity of the T-cell modulatory multimeric polypeptide comprising a variant of the wild-type immunomodulatory polypeptide to the cognate co-immunomodulatory polypeptide, when measured by bio-layer interferometry, is at least 10:1, at least 50:1, at least 10²:1, or at least 10³:1.

[0481] Aspect 59. A T-cell modulatory multimeric polypeptide of any one of aspects 56-58, wherein the first or the second polypeptide comprises an immunoglobulin (Ig) Fc polypeptide.

[0482] Aspect 60. A T-cell modulatory multimeric polypeptide of aspect 59, wherein the Ig Fc polypeptide is an IgG1 Fc polypeptide.

[0483] Aspect 61. A T-cell modulatory multimeric polypeptide of aspect 59, wherein the Ig Fc polypeptide is an IgG4 Fc polypeptide.

[0484] Aspect 62. A T-cell modulatory multimeric polypeptide of aspect 60, wherein IgG1 Fc polypeptide comprises one or more amino acid substitutions selected from N297A, L234A, L235A, L234F, L235E, and P331S.

[0485] Aspect 63. A T-cell modulatory multimeric polypeptide of any one of aspects 56-62, wherein

a1) the first polypeptide comprises, in order from N-terminus to C-terminus:

[0486] i) the peptide epitope;

[0487] ii) the first class I MHC polypeptide; and

[0488] iii) at least one immunomodulatory polypeptide; and

b1) the second polypeptide comprises, in order from N-terminus to C-terminus:

[0489] i) the second class I MHC polypeptide; and

[0490] ii) an immunoglobulin (Ig) Fc polypeptide; or

a2) the first polypeptide comprises, in order from N-terminus to C-terminus:

[0491] i) the peptide epitope; and

[0492] ii) the first class I MHC polypeptide; and

b2) the second polypeptide comprises, in order from N-terminus to C-terminus:

[0493] i) at least one immunomodulatory polypeptide;

[0494] ii) the second class I MHC polypeptide; and

[0495] iii) an Ig Fc polypeptide; or

a3) the first polypeptide comprises, in order from N-terminus to C-terminus:

[0496] i) the peptide epitope; and

[0497] ii) the first class I MHC polypeptide; and

b3) the second polypeptide comprises, in order from N-terminus to C-terminus:

[0498] i) the second class I MHC polypeptide; and

[0499] ii) an Ig Fc polypeptide; and

[0500] iii) at least one immunomodulatory polypeptide; or

a4) the first polypeptide comprises, in order from N-terminus to C-terminus:

[0501] i) the peptide epitope; and

[0502] ii) the first class I MHC polypeptide; and

b4) the second polypeptide comprises, in order from N-terminus to C-terminus:

[0503] i) the second class I MHC polypeptide; and

[0504] ii) at least one immunomodulatory polypeptide; or

a5) the first polypeptide comprises, in order from N-terminus to C-terminus:

[0505] i) the peptide epitope; and

[0506] ii) the first class I MHC polypeptide; and

b5) a second polypeptide comprises, in order from N-terminus to C-terminus:

[0507] i) at least one immunomodulatory polypeptide; and

[0508] ii) the second class I MHC polypeptide; or

a6) the first polypeptide comprises, in order from N-terminus to C-terminus:

[0509] i) the peptide epitope;

[0510] ii) the first class I MHC polypeptide; and

[0511] iii) at least one immunomodulatory polypeptide; and

b6) the second polypeptide comprises:

[0512] i) the second class I MHC polypeptide.

[0513] Aspect 64. A T-cell modulatory multimeric polypeptide of any one of aspects 56-63, wherein the first MHC polypeptide is a β2-microglobulin polypeptide; and wherein the second MHC polypeptide is an MHC class I heavy chain polypeptide.

[0514] Aspect 65. A T-cell modulatory multimeric polypeptide of any one of aspects 56-64, wherein the at least one immunomodulatory polypeptide is selected from the group consisting of a cytokine (e.g., an IL2 polypeptide, an IL7 polypeptide, an IL12 polypeptide, an IL15 polypeptide, an IL17 polypeptide, an IL21 polypeptide, an IL27 polypeptide, an IL-23 polypeptide, a TGFβ polypeptide, and the like; and including all family members, e.g., IL17A, IL-17B, IL-17C, IL-17D, IL-17E, IL-17F, IL-17E), a 4-1BBL polypeptide, an ICOS-L polypeptide, an OX-40L polypeptide, a CD80 polypeptide, a CD86 polypeptide, a CD40 polypeptide, a CD70 polypeptide, a JAG1 (CD339) polypeptide, an ICAM (CD540 polypeptide, a PD-L1 polypeptide, a FasL polypeptide, a PD-L2 polypeptide, a PD-1H (VISTA) polypeptide, an ICOS-L (CD275) polypeptide, a GITRL polypeptide, an HVEM polypeptide, a CXCL10 polypeptide, a CXCL9 polypeptide, a CXCL11 polypeptide, a CXCL13 polypeptide, and a CX3CL1 polypeptide, a Galectin-9 polypeptide, a CD83 polypeptide, a CD30L polypeptide, a HLA-G polypeptide, a MICA polypeptide, a MICB polypeptide, a HVEM (CD270) polypeptide, a lymphotoxin beta receptor polypeptide, a 3/TR6 polypeptide, an ILT3 polypeptide, an ILT4 polypeptide, a CXCL10 polypeptide, a CXCL9 polypeptide, a CXCL11 polypeptide, a CXCL13 polypeptide, and a CX3CL1 polypeptide, and combinations thereof.

[0515] Aspect 66. A T-cell modulatory multimeric polypeptide of any one of aspects 56-64, wherein the at least one immunomodulatory polypeptide is an IL-2 polypeptide.

[0516] Aspect 67. A T-cell modulatory multimeric polypeptide of any one of aspects 56-66, wherein the multimeric polypeptide comprises at least two immunomodulatory polypeptides, and wherein at least two of the immunomodulatory polypeptides are the same.

[0517] Aspect 68. A T-cell modulatory multimeric polypeptide of aspect 67, wherein the 2 or more immunomodulatory polypeptides are in tandem.

[0518] Aspect 69. The T-cell modulatory multimeric polypeptide of any one of aspects 56-68, wherein: a) a first disulfide bond is between: i) a Cys present in a linker between the peptide epitope and the first MHC class I polypeptide, wherein the first MHC class I polypeptide is a β2M polypeptide; and ii) a Cys residue introduced via a Y84C substitution in the second MHC class I polypeptide, wherein the second MHC class I polypeptide is a MHC Class I heavy chain polypeptide; and b) a second disulfide bond is between: i) a Cys residue introduced into the β2M polypeptide via an R12C substitution; and ii) a Cys residue introduced into the MHC Class I heavy chain polypeptide via an A236C substitution.

[0519] Aspect 70. A T-cell modulatory multimeric polypeptide of aspect 69, wherein the linker comprises the amino acid sequence GCGGS (SEQ ID NO:318).

[0520] Aspect 71. A T-cell modulatory multimeric polypeptide of aspect 70, wherein the linker comprises the amino acid sequence GCGGS(GGGGS)n (SEQ ID NO:342), where n is an integer from 1 to 10.

[0521] Aspect 72. A T-cell modulatory multimeric polypeptide of any one of aspects 56-71, wherein the peptide epitope is a cancer-associated peptide epitope.

[0522] Aspect 73. A T-cell modulatory multimeric polypeptide of any one of aspects 56-71, wherein the peptide epitope is a virus-associated peptide epitope.

[0523] Aspect 74. A T-cell modulatory multimeric polypeptide of any one of aspects 56-73, wherein the first or the second MHC polypeptide comprises: a) an amino acid sequence having at least 95% amino acid sequence identity to the HLA-A*0101, HLA-A*0201, HLA-A*0201, HLA-A*1101, HLA-A*2301, HLA-A*2402, HLA-A*2407, HLA-A*3303, or HLA-A*3401 amino acid sequence depicted in FIG. 7A; or b) an amino acid sequence having at least 95% amino acid sequence identity to the HLA-B*0702, HLA-B*0801, HLA-B*1502, HLA-B*3802, HLA-B*4001, HLA-B*4601, or HLA-B*5301 amino acid sequence depicted in FIG. 8A; or c) an amino acid sequence having at least 95% amino acid sequence identity to the HLA-C*0102, HLA-C*0303, HLA-C*0304, HLA-C*0401, HLA-C*0602, HLA-C*0701, HLA-C*0702, HLA-C*0801, or HLA-C*1502 depicted in FIG. 9A.

[0524] Aspect 75. A T-cell modulatory multimeric polypeptide of any one of aspects 56-73, wherein the first MHC polypeptide is a β2M polypeptide, and wherein the second MHC polypeptide comprises an amino acid sequence having at least 95% amino acid sequence identity to an HLA-A*2402 polypeptide.

[0525] Aspect 76. A T-cell modulatory multimeric polypeptide of any one of aspects 56-73, wherein the first MHC polypeptide is a β2M polypeptide, and wherein the second MHC polypeptide is an HLA-A*1101 polypeptide.

[0526] Aspect 77. A T-cell modulatory multimeric polypeptide of any one of aspects 56-73, wherein the first MHC polypeptide is a β2M polypeptide, and wherein the second MHC polypeptide comprises an amino acid sequence having at least 95% amino acid sequence identity to an HLA-A*3303 polypeptide.

[0527] Aspect 78. A T-cell modulatory multimeric polypeptide of any one of aspects 56-73, wherein the first MHC polypeptide is a β2M polypeptide, and wherein the second MHC polypeptide comprises an amino acid sequence having at least 95% amino acid sequence identity to an HLA-A*0201 polypeptide.

[0528] Aspect 79. A T-cell modulatory multimeric polypeptide of any one of aspects 56-78, wherein the MHC heavy chain polypeptide comprises a Cys at position 236.

[0529] Aspect 80. A T-cell modulatory multimeric polypeptide of any one of aspects 56-79, wherein the β2M polypeptide comprises a Cys at position 12.

[0530] Aspect 81. A T-cell modulatory multimeric polypeptide of any one of aspects 56-80, wherein the immunomodulatory polypeptide is a variant IL-2 polypeptide comprising: i) an H16A substitution and an F42A substation; or ii) an H16T substitution and an F42A substitution.

[0531] Aspect 82. A T-cell modulatory multimeric polypeptide of any one of aspects 56-81, wherein the multimeric polypeptide comprises a first and a second heterodimer, and wherein the first and second heterodimers are covalently bound by one or more disulfide bonds between the Ig Fc polypeptides of the first and second heterodimers.

[0532] Aspect 83. A nucleic acid comprising a nucleotide sequence encoding a first or second polypeptide according to any one of aspects 56-82, wherein the first or second polypeptide comprises at least one immunomodulatory domain.

[0533] Aspect 84. An expression vector comprising the nucleic acid of aspect 83.

[0534] Aspect 85. A method of selectively modulating the activity of T cell specific for a peptide epitope, the method comprising contacting the T cell with a T-cell modulatory multimeric polypeptide according to any one of aspects 56-82, wherein said contacting selectively modulates the activity of the epitope-specific T cell.

[0535] Aspect 86. A method of treating a patient having a cancer, the method comprising administering to the patient an effective amount of a pharmaceutical composition comprising T-cell modulatory multimeric polypeptide according to any one of aspects 56-82.

[0536] Aspect 87. The method of aspect 86, wherein said administering is intramuscular.

[0537] Aspect 88. The method of aspect 86, wherein said administering is intravenous.

[0538] Aspect 89. A method of any one of aspects 86-88, further comprising administering one or more checkpoint inhibitors to the individual.

[0539] Aspect 90. A method according to aspect 89, wherein the checkpoint inhibitor is an antibody that binds to a polypeptide selected from the group consisting of CD27, CD28, CD40, CD122, CD96, CD73, CD47, OX40, GITR, CSF1R, JAK, PI3K delta, PI3K gamma, TAM, arginase, CD137, ICOS, A2AR, B7-H3, B7-H4, BTLA, CTLA-4, LAG3, TIM3, VISTA, CD96, TIGIT, CD122, PD-1, PD-L1, and PD-L2.

[0540] Aspect 91. A method according to aspect 89, wherein the checkpoint inhibitor is an antibody specific for PD-1, PD-L1, or CTLA4.

[0541] Aspect 92. A method according to aspect 89, wherein the one or more checkpoint inhibitors is selected from the group consisting of nivolumab, pembrolizumab, pidilizumab, AMP-224, MPDL3280A, MDX-1105, MEDI-4736, arelumab, ipilimumab, tremelimumab, pidilizumab, IMP321, MGA271, BMS-986016, lirilumab, urelumab, PF-05082566, IPH2101, MEDI-6469, CP-870,893, Mogamulizumab, Varlilumab, Avelumab, Galiximab, AMP-514, AUNP 12, Indoximod, NLG-919, INCB024360, KN035, and combinations thereof.

[0542] Aspect 93. A method of modulating an immune response in an individual, the method comprising administering to the individual an effective amount of the T-cell modulatory multimeric polypeptide of any one of aspects 56-82, wherein said administering induces an epitope-specific T cell response and an epitope-non-specific T cell response, wherein the ratio of the epitope-specific T cell response to the epitope-non-specific T cell response is at least 2:1.

[0543] Aspect 94. A method of delivering an immunomodulatory polypeptide selectively to a target T cell, the method comprising contacting a mixed population of T cells with a T-cell modulatory multimeric polypeptide of any one of aspects 56-82, wherein the mixed population of T cells comprises the target T cell and non-target T cells, wherein the target T cell is specific for the epitope present within the T-cell modulatory multimeric polypeptide, and wherein said contacting delivers the one or more immunomodulatory polypeptides present within the T-cell modulatory multimeric polypeptide to the target T cell.

[0544] Aspect 95. A method of detecting, in a mixed population of T cells obtained from an individual, the presence of a target T cell that binds a peptide epitope, the method comprising: a) contacting in vitro the mixed population of T cells with the T-cell modulatory multimeric polypeptide of any one of aspects 56-82, wherein the T-cell modulatory multimeric polypeptide comprises the peptide epitope; and b) detecting activation and/or proliferation of T cells in response to said contacting, wherein activated and/or proliferated T cells indicates the presence of the target T cell.

[0545] While the present invention has been described with reference to the specific embodiments thereof, it should be understood by those skilled in the art that various changes may be made and equivalents may be substituted without departing from the true spirit and scope of the invention. In addition, many modifications may be made to adapt a particular situation, material, composition of matter, process, process step or steps, to the objective, spirit and scope of the present invention. All such modifications are intended to be within the scope of the claims appended hereto.

The application's sequence listing, which the Patent Office published only in electronic form, follows.

SEQUENCE LISTING (462 sequences)

SEQ ID NO: 1 - protein, 245 aa, Homo sapiens
MRIFAVFIFMTYWHLLNAFTVTVPKDLYVVEYGSNMTIECKFPVEKQLDLAALIVYWEMEDKNIIQFVHGEEDLKVQHSSYRQRARLLKDQLSLGNAALQITDVKLQDAGVYRCMISYGGADYKRITVKVNAPYNKINQRILVVDPVTSEHELTCQAEGYPKAEVIWTSSDHQVLSGKTTTTNSKREEKLFNVTSTLRINTTTNEIFYCTFRRLDPEENHTAELVIPGNILNVSIKICLTLSPST

SEQ ID NO: 2 - protein, 219 aa, Homo sapiens
FTVTVPKDLYVVEYGSNMTIECKFPVEKQLDLAALIVYWEMEDKNIIQFVHGEEDLKVQHSSYRQRARLLKDQLSLGNAALQITDVKLQDAGVYRCMISYGGADYKRITVKVNAPYNKINQRILVVDPVTSEHELTCQAEGYPKAEVIWTSSDHQVLSGKTTTTNSKREEKLFNVTSTLRINTTTNEIFYCTFRRLDPEENHTAELVIPGNILNVSIKI

SEQ ID NO: 3 - protein, 268 aa, Homo sapiens
PGWFLDSPDRPWNPPTFSPALLVVTEGDNATFTCSFSNTSESFVLNWYRMSPSNQTDKLAAFPEDRSQPGQDCRFRVTQLPNGRDFHMSVVRARRNDSGTYLCGAISLAPKAQIKESLRAELRVTERRAEVPTAHPSPSPRPAGQFQTLVVGVVGGLLGSLVLLVWVLAVICSRAARGTIGARRTGQPLKEDPSAVPVFSVDYGELDFQWREKTPEPPVPCVPEQTEYATIVFPSGMGTSSPARRGSADGPRSAQPLRPEDGHCSWPL

SEQ ID NO: 4 - protein, 208 aa, Homo sapiens [sequence omitted]

SEQ ID NO: 5 - protein, 220 aa, Homo sapiens
MLRLLLALNLFPSIQVTGNKILVKQSPMLVAYDNAVNLSCKYSYNLFSREFRASLHKGLDSAVEVCVVYGNYSQQLQVYSKTGFNCDGKLGNESVTFYLQNLYVNQTDIYFCKIEVMYPPPYLDNEKSNGTIIHVKGKHLCPSPLFPGPSKPFWVLVVVGGVLACYSLLVTVAFIIFWVRSKRSRLLHSDYMNMTPRRPGPTRKHYQPYAPPRDFAAYRS

SEQ ID NO: 6 - protein, 123 aa, Homo sapiens
MLRLLLALNLFPSIQVTGNKILVKQSPMLVAYDNAVNLSWKHLCPSPLFPGPSKPFWVLVVVGGVLACYSLLVTVAFIIFWVRSKRSRLLHSDYMNMTPRRPGPTRKHYQPYAPPRDFAAYRS

SEQ ID NO: 7 - protein, 101 aa, Homo sapiens
MLRLLLALNLFPSIQVTGKHLCPSPLFPGPSKPFWVLVVVGGVLACYSLLVTVAFIIFWVRSKRSRLLHSDYMNMTPRRPGPTRKHYQPYAPPRDFAAYRS

SEQ ID NO: 8 - protein, 224 aa, Homo sapiens
APLKIQAYFNETADLPCQFANSQNQSLSELVVFWQDQENLVLNEVYLGKEKFDSVHSKYMNRTSFDSDSWTLRLHNLQIKDKGLYQCIIHHKKPTGMIRIHQMNSELSVLANFSQPEIVPISNITENVYINLTCSSIHGYPEPKKMSVLLRTKNSTIEYDGIMQKSQDNVTELYDVSISLSVSFPDVTSNMTIFCILETDKTRLLSSPFSIELEDPQPPPDHIP

SEQ ID NO: 9 - protein, 110 aa, Homo sapiens
APLKIQAYFNETADLPCQFANSQNQSLSELVVFWQDQENLVLNEVYLGKEKFDSVHSKYMNRTSFDSDSWTLRLHNLQIKDKGLYQCIIHHKKPTGMIRIHQMNSELSVL

SEQ ID NO: 10 - protein, 254 aa, Homo sapiens
MEYASDASLDPEAPWPPAPRARACRVLPWALVAGLLLLLLLAAACAVFLACPWAVSGARASPGSAASPRLREGPELSPDDPAGLLDLRQGMFAQLVAQNVLLIDGPLSWYSDPGLAGVSLTGGLSYKEDTKELVVAKAGVYYVFFQLELRRVVAGEGSGSVSLALHLQPLRSAAGAAALALTVDLPPASSEARNSAFGFQGRLLHLSAGQRLGVHLHTEARARHAWQLTQGATVLGLFRVTPEIPAGLPSPRSE

SEQ ID NO: 11 - protein, 174 aa, Homo sapiens
PAGLLDLRQGMFAQLVAQNVLLIDGPLSWYSDPGLAGVSLTGGLSYKEDTKELVVAKAGVYYVFFQLELRRVVAGEGSGSVSLALHLQPLRSAAGAAALALTVDLPPASSEARNSAFGFQGRLLHLSAGQRLGVHLHTEARARHAWQLTQGATVLGLFRVTPEIPAGLPSPRSE

SEQ ID NO: 12 - protein, 175 aa, Homo sapiens
DPAGLLDLRQGMFAQLVAQNVLLIDGPLSWYSDPGLAGVSLTGGLSYKEDTKELVVAKAGVYYVFFQLELRRVVAGEGSGSVSLALHLQPLRSAAGAAALALTVDLPPASSEARNSAFGFQGRLLHLSAGQRLGVHLHTEARARHAWQLTQGATVLGLFRVTPEIPAGLPSPRSE

SEQ ID NO: 13 - protein, 167 aa, Homo sapiens
DPAGLLDLRQGMFAQLVAQNVLLIDGPLSWYSDPGLAGVSLTGGLSYKEDTKELVVAKAGVYYVFFQLELRRVVAGEGSGSVSLALHLQPLRSAAGAAALALTVDLPPASSEARNSAFGFQGRLLHLSAGQRLGVHLHTEARARHAWQLTQGATVLGLFRVTPEIPA

SEQ ID NO: 14 - protein, 255 aa, Homo sapiens
MGNSCYNIVATLLLVLNFERTRSLQDPCSNCPAGTFCDNNRNQICSPCPPNSFSSAGGQRTCDICRQCKGVFRTRKECSSTSNAECDCTPGFHCLGAGCSMCEQDCKQGQELTKKGCKDCCFGTFNDQKRGICRPWTNCSLDGKSVLVNGTKERDVVCGPSPADLSPGASSVTPPAPAREPGHSPQIISFFLALTSTALLFLLFFLTLRFSVVKRGRKKLLYIFKQPFMRPVQTTQEEDGCSCRFPEEEEGGCEL

SEQ ID NO: 15 - protein, 133 aa, Homo sapiens [sequence omitted]

SEQ ID NO: 16 - protein, 251 aa, Homo sapiens
ELCDDDPPEIPHATFKAMAYKEGTMLNCECKRGFRRIKSGSLYMLCTGNSSHSSWDNQCQCTSSATRNTTKQVTPQPEEQKERKTTEMQSPMQPVDQASLPGHCREPPPWENEATERIYHFVVGQMVYYQCVQGYRALHRGPAESVCKMTHGKTRWTQPQLICTGEMETSQFPGEEKPQASPEGRPESETSCLVTTTDFQIQTEMAATMETSIFTTEYQVAVAGCVFLLISVLLLSGLTWQRRQRKSRRTI

SEQ ID NO: 17 - protein, 524 aa, Homo sapiens
VNGTSQFTCFYNSRANISCVWSQDGALQDTSCQVHAWPDRRRWNQTCELLPVSQASWACNLILGAPDSQKLTTVDIVTLRVLCREGVRWRVMAIQDFKPFENLRLMAPISLQVVHVETHRCNISWEISQASHYFERHLEFEARTLSPGHTWEEAPLLTLKQKQEWICLETLTPDTQYEFQVRVKPLQGEFTTWSPWSQPLAFRTKPAALGKDTIPWLGHLLVGLSGAFGFIILVYLLINCRNTGPWLKKVLKCNTPDPSKFFSQLSSEHGGDVQKWLSSPFPSSSFSPGGLAPEISPLEVLERDKVTQLLLQQDKVPEPASLSSNHSLTSCFTNQGYFFFHLPDALEIEACQVYFTYDPYSEEDPDEGVAGAPTGSSPQPLQPLSGEDDAYCTFPSRDDLLLFSPSLLGGPSPPSTAPGGSGAGEERMPPSLQERVPRDWDPQPLGPPTPGVPDLVDFQPPPELVLREAGEEVPDAGPREGVSFPWSRPPGQGEFRALNARLPLNTDAYLSLQELQGQDPTHLV

SEQ ID NO: 18 - protein, 347 aa, Homo sapiens
LNTTILTPNGNEDTTADFFLTTMPTDSLSVSTLPLPEVQCFVFNVEYMNCTWNSSSEPQPTNLTLHYWYKNSDNDKVQKCSHYLFSEEITSGCQLQKKEIHLYQTFVVQLQDPREPRRQATQMLKLQNLVIPWAPENLTLHKLSESQLELNWNNRFLNHCLEHLVQYRTDWDHSWTEQSVDYRHKFSLPSVDGQKRYTFRVRSRFNPLCGSAQHWSEWSHPIHWGSNTSKENPFLFALEAVVISVGSMGLIISLLCVYFWLERTMPRIPTLKNLEDLVTEYHGNFSAWSGVSKGLAESLQPDYSERLCLVSEIPPKGGALGEGPGASPCNQHSPYWAPPCYTLKPET

SEQ ID NO: 19 - protein, 119 aa, Homo sapiens
MSRSVALAVLALLSLSGLEAIQRTPKIQVYSRHPAENGKSNFLNCYVSGFHPSDIEVDLLKNGERIEKVEHSDLSFSKDWSFYLLYYTEFTPTEKDEYACRVNHVTLSQPKIVKWDRDM

SEQ ID NO: 20 - protein, 119 aa, Macaca mulatta
MSRSVALAVLALLSLSGLEAIQRTPKIQVYSRHPPENGKPNFLNCYVSGFHPSDIEVDLLKNGEKMGKVEHSDLSFSKDWSFYLLYYTEFTPNEKDEYACRVNHVTLSGPRTVKWDRDM

SEQ ID NO: 21 - protein, 118 aa, Bos Taurus
MARFVALVLLGLLSLSGLDAIQRPPKIQVYSRHPPEDGKPNYLNCYVYGFHPPQIEIDLLKNGEKIKSEQSDLSFSKDWSFYLLSHAEFTPNSKDQYSCRVKHVTLEQPRIVKWDRDL

SEQ ID NO: 22 - protein, 119 aa, Mus musculus
MARSVTLVFLVLVSLTGLYAIQKTPQIQVYSRHPPENGKPNILNCYVTQFHPPHIEIQMLKNGKKIPKVEMSDMSFSKDWSFYILAHTEFTPTETDTYACRVKHASMAEPKTVYWDRDM

SEQ ID NO: 23 - protein, 365 aa, Homo sapiens
MAVMAPRTLLLLLSGALALTQTWAGSHSMRYFFTSVSRPGRGEPRFIAVGYVDDTQFVRFDSDAASQKMEPRAPWIEQEGPEYWDQETRNMKAHSQTDRANLGTLRGYYNQSEDGSHTIQIMYGCDVGPDGRFLRGYRQDAYDGKDYIALNEDLRSWTAADMAAQITKRKWEAVHAAEQRRVYLEGRCVDGLRRYLENGKETLQRTDPPKTHMTHHPISDHEATLRCWALGFYPAEITLTWQRDGEDQTQDTELVETRPAGDGTFQKWAAVVVPSGEEQRYTCHVQHEGLPKPLTLRWELSSQPTIPIVGIIAGLVLLGAVITGAVVAAVMWRRKSSDRKGGSYTQAASSDSAQGSDVSLTACKV

SEQ ID NO: 24 - protein, 365 aa, Homo sapiens
MAVMAPRTLLLLLSGALALTQTWAGSHSMRYFYTSVSRPGRGEPRFIAVGYVDDTQFVRFDSDAASQRMEPRAPWIEQEGPEYWDQETRNVKAQSQTDRVDLGTLRGYYNQSEDGSHTIQIMYGCDVGPDGRFLRGYRQDAYDGKDYIALNEDLRSWTAADMAAQITKRKWEAAHAAEQQRAYLEGRCVEWLRRYLENGKETLQRTDPPKTHMTHHPISDHEATLRCWALGFYPAEITLTWQRDGEDQTQDTELVETRPAGDGTFQKWAAVVVPSGEEQRYTCHVQHEGLPKPLTLRWELSSQPTIPIVGIIAGLVLLGAVITGAVVAAVMWRRKSSDRKGGSYTQAASSDSAQGSDVSLTACKV

SEQ ID NO: 25 - protein, 365 aa, Homo sapiens [sequence omitted]

SEQ ID NO: 26 - protein, 365 aa, Homo sapiens [sequence omitted]

SEQ ID NO: 27 - protein, 362 aa, Homo sapiens
MLVMAPRTVLLLLSAALALTETWAGSHSMRYFYTSVSRPGRGEPRFISVGYVDDTQFVRFDSDAASPREEPRAPWIEQEGPEYWDRNTQIYKAQAQTDRESLRNLRGYYNQSEAGSHTLQSMYGCDVGPDGRLLRGHDQYAYDGKDYIALNEDLRSWTAADTAAQITQRKWEAAREAEQRRAYLEGECVEWLRRYLENGKDKLERADPPKTHVTHHPISDHEATLRCWALGFYPAEITLTWQRDGEDQTQDTELVETRPAGDRTFQKWAAVVVPSGEEQRYTCHVQHEGLPKPLTLRWEPSSQSTVPIVGIVAGLAVLAVVVIGAVVAAVMCRRKSSGGKGGSYSQAACSDSAQGSDVSLTA

SEQ ID NO: 28 - protein, 366 aa, Homo sapiens
MRVMAPRALLLLLSGGLALTETWACSHSMRYFDTAVSRPGRGEPRFISVGYVDDTQFVRFDSDAASPRGEPRAPWVEQEGPEYWDRETQNYKRQAQADRVSLRNLRGYYNQSEDGSHTLQRMYGCDLGPDGRLLRGYDQSAYDGKDYIALNEDLRSWTAADTAAQITQRKLEAARAAEQLRAYLEGTCVEWLRRYLENGKETLQRAEPPKTHVTHHPLSDHEATLRCWALGFYPAEITLTWQRDGEDQTQDTELVETRPAGDGTFQKWAAVVVPSGQEQRYTCHMQHEGLQEPLTLSWEPSSQPTIPIMGIVAGLAVLVVLAVLGAVVTAMMCRRKSSGGKGGSCSQAACSNSAQGSDESLITCKA

SEQ ID NO: 29 - protein, 276 aa, Artificial sequence
  synthetic sequence
  Misc_feature (9)..(9): X is phenylalanine, tyrosine, serine, or threonine
  Misc_feature (44)..(44): X is lysine or arginine
  Misc_feature (62)..(62): X is glutamine, glycine, glutamic acid, or arginine
  Misc_feature (63)..(63): X is asparagine or glutamic acid
  Misc_feature (65)..(65): X is arginine or glycine
  Misc_feature (66)..(66): X is asparagine or lysine
  Misc_feature (67)..(67): X is methionine or valine
  Misc_feature (70)..(70): X is histidine or glutamine
  Misc_feature (73)..(73): X is threonine or isoleucine
  Misc_feature (74)..(74): X is aspartic acid or histidine
  Misc_feature (76)..(76): X is alanine, valine, or glutamic acid
  Misc_feature (77)..(77): X is asparagine or aspartic acid
  Misc_feature (79)..(79): X is glycine or arginine
  Misc_feature (80)..(80): X is threonine or arginine
  Misc_feature (81)..(81): X is leucine or alanine
  Misc_feature (82)..(82): X is arginine or leucine
  Misc_feature (83)..(83): X is glycine ir arginine
  Misc_feature (90)..(90): X is alanine or aspartic acid
  Misc_feature (95)..(95): X is isoleucine, leucine, or valine
  Misc_feature (97)..(97): X is isoleucine, arginine, or methionine
  Misc_feature (99)..(99): X is phenylalanine or tyrosine
  Misc_feature (105)..(105): X is serine or proline
  Misc_feature (107)..(107): X is tryptophan or glycine
  Misc_feature (114)..(114): X is arginine, histidine, or glutamine
  Misc_feature (116)..(116): X is aspartic acid or tyrosine
  Misc_feature (127)..(127): X is asparagine or lysine
  Misc_feature (142)..(142): X is threonine or isoleucine
  Misc_feature (144)..(144): X is lysine or glutamine
  Misc_feature (145)..(145): X is arginine or histidine
  Misc_feature (149)..(149): X is alanine or threonine
  Misc_feature (150)..(150): X is alanine or valine
  Misc_feature (151)..(151): X is histidine or arginine
  Misc_feature (156)..(156): X is arginine, leucine, glutamine, or tryptophan
  Misc_feature (158)..(158): X is valine or alanine
  Misc_feature (161)..(161): X is aspartic acid or glutamic acid
  Misc_feature (163)..(163): X is arginine or threonine
  Misc_feature (166)..(166): X is aspartic acid or glutamic acid
  Misc_feature (167)..(167): X is tryptophan or glycine
  Misc_feature (184)..(184): X is proline or alanine
  Misc_feature (193)..(193): X is proline or alanine
  Misc_feature (194)..(194): X is valine or isoleucine
  Misc_feature (207)..(207): X is serine or glycine
  Misc_feature (246)..(246): X is alanine or serine
  Misc_feature (253)..(253): X is glutamine or glutamic acid
  Misc_feature (276)..(276): X is proline or leucine
GSHSMRYFXTSVSRPGRGEPRFIAVGYVDDTQFVRFDSDAASQXMEPRAPWIEQEGPEYWDXXTXXXKAXSQXXRXXLXXXXXYYNQSEXGSHTXQXMXGCDVGXDXRFLRGYXQXAYDGKDYIALXEDLRSWTAADMAAQXTXXKWEXXXEAEQXRXYLXGXCVXXLRRYLENGKETLQRTDXPKTHMTHHXXSDHEATLRCWALXFYPAEITLTWQRDGEDQTQDTELVETRPAGDGTFQKWAXVVVPSGXEQRYTCHVQHEGLPKPLTLRWEX

SEQ ID NO: 30 - protein, 276 aa, Artificial sequence
  synthetic sequence
  Misc_feature (9)..(9): X is histidinem tyrosine, or aspartic acid
  Misc_feature (11)..(11): X is alanien or serine
  Misc_feature (12)..(12): X is methionine or valine
  Misc_feature (24)..(24): X is alanine, serine, or threonine
  Misc_feature (32)..(32): X is glutamie or leucine
  Misc_feature (41)..(41): X is alanine or threonine
  Misc_feature (45)..(45): X is glutamic acid, methionine, lysine, or threonine
  Misc_feature (46)..(46): X is alanine or threonine
  Misc_feature (63)..(63): X is glutamic acid or asparagine
  Misc_feature (66)..(66): X is isoleucine or lysine
  Misc_feature (67)..(67): X is tyrosine, phenylalanie, serine, or cystine
  Misc_feature (70)..(70): X is asparagine or glutamine
  Misc_feature (71)..(71): X is alanine or threonine
  Misc_feature (74)..(74): X is aspartic acid or tyrosine
  Misc_feature (76)..(76): X is glutamic acid or valine
  Misc_feature (77)..(77): X is serine or asparagine
  Misc_feature (80)..(80): X is threonine, asparagine, or isoleucine
  Misc_feature (81)..(81): X is alanine or leucine
  Misc_feature (82)..(82): X is leucine or arginine
  Misc_feature (83)..(83): X is arginine or glycine
  Misc_feature (94)..(94): X is threonine or isoleucine
  Misc_feature (95)..(95): X is leucine or isoleucine
  Misc_feature (97)..(97): X is arginine or serine
  Misc_feature (131)..(131): X is arginine or serine
  Misc_feature (143)..(143): X is S or T
  Misc_feature (147)..(147): X is L or W
  misc_feature (152)..(152): Xaa is E OR V
  misc_feature (156)..(156): Xaa is R, D, L
  misc_feature (158)..(158): Xaa A or T
  Misc_feature (163)..(163): X is leucine, glutamic acid, or threonine
  Misc_feature (177)..(177): X is glutamic acid or aspartic acid
  Misc_feature (178)..(178): X is lysine or threonine
  Misc_feature (180)..(180): X is glutamic acid or glutamine
  Misc_feature (194)..(194): X is isoleucine or valine
GSHSMRYFXTXXSRPGRGEPRFIXVGYVDDTXFVRFDSDAXSPRXXPRAPWIEQEGPEYWDRXTQXXKTXXTQXYXXNLXXXXYYNQSEAGSHXXQXMYGCDLGPDGRLLRGHDQSAYDGKDYIALNEDLXSWTAADTAAQIXQRKXEAARXAEQXRXYLEGXCVEWLRRYLENGKXXLXRADPPKTHVTHHPXSDHEATLRCWALGFYPAEITLTWQRDGEDQTQDTELVETRPAGDRTFQKWAAVVVPSGEEQRYTCHVQHEGLPKPLTLRWEP

SEQ ID NO: 31 - protein, 276 aa, Artificial sequence
  synthetic sequence
  Misc_feature (1)..(1): X is cysteine or glycine
  Misc_feature (6)..(6): X is arginine or lysine
  Misc_feature (9)..(9): X is phenylalanine, tyrosine, serine, or aspartic acid
  Misc_feature (14)..(14): X is arginine or tryptophan
  Misc_feature (21)..(21): X is histidine or arginine
  Misc_feature (24)..(24): X is alanine or serine
  Misc_feature (35)..(35): X is glutamine or arginine
  Misc_feature (49)..(49): X is alanine or arginine
  Misc_feature (66)..(66): X is asparagine, or lysine
  Misc_feature (73)..(73): X is threonine or alanine
  Misc_feature (77)..(77): X is serine or asparagine
  Misc_feature (80)..(80): X is asparagine or lysine
  Misc_feature (90)..(90): X is alanine or aspartic acid
  Misc_feature (91)..(91): X is glycine or arginine
  Misc_feature (94)..(94): X is threonine or isoleucine
  Misc_feature (95)..(95): X is leucine or isoleucine
  Misc_feature (97)..(97): X is tryptophan or arginine
  Misc_feature (99)..(99): X is cysteine, tyrosine, phenylalanine, or serine
  Misc_feature (103)..(103): X is leucine or valine
  Misc_feature (113)..(113): X is tyrosine or histidine
  Misc_feature (114)..(114): X is aspartic acid or asparagine
  Misc_feature (116)..(116): X is tyrosine, phenylalanine, serine, or leucine
  Misc_feature (147)..(147): X is leucine or tryptophan
  Misc_feature (152)..(152): X is glutamic acid, alanine, or threonine
  Misc_feature (156)..(156): X is arginine, leucine, or tryptophan
  Misc_feature (163)..(163): X is leucine or threonine
  Misc_feature (173)..(173): X is glutamic acid or lysine
  Misc_feature (177)..(177): X is glutamic acid or lysine
  Misc_feature (184)..(184): X is histidine or proline
  Misc_feature (194)..(194): X is arginine or valine
  Misc_feature (219)..(219): X is tryptophan or arginine
  Misc_feature (248)..(248): X is valine or methionine
  Misc_feature (253)..(253): X is glutamic acid or lysine
  Misc_feature (261)..(261): X is methionine or valine
  Misc_feature (267)..(267): X is proline or glutamine
  Misc_feature (273)..(273): X is arginine or serine
  Misc_feature (275)..(275): X is proline or glycine
XSHSMXYFXTAVSXPGRGEPXFIXVGYVDDTQFVXFDSDAASPRGEPRXPWVEQEGPEYWDRETQXYKRQAQXDRVXLRXLRGYYNQSEXXSHXXQXMXGCDXGPDGRLLRGXXQXAYDGKDYIALNEDLRSWTAADTAAQITQRKXEAARXAEQXRAYLEGXCVEWLRRYLXNGKXTLQRAEXPKTHVTHHPXSDHEATLRCWALGFYPAEITLTWQXDGEDQTQDTELVETRPAGDGTFQKWAAVXVPSGXEQRYTCHXQHEGLXEPLTLXWXP

SEQ ID NO: 32 - protein, 284 aa, Artificial sequence
  synthetic sequence
  misc_feature (89)..(89): Xaa is K or E
  misc_feature (107)..(107): Xaa is R or G
  misc_feature (157)..(157): Xaa is R or G
  misc_feature (158)..(158): Xaa is A or V
  misc_feature (255)..(255): Xaa is Q or P
  misc_feature (267)..(267): Xaa is P or S
GSHSLKYFHTSVSRPGRGEPRFISVGYVDDTQFVRFDNDAASPRMVPRAPWMEQEGSEYWDRETRSARDTAQIFRVNLRTLRGYYNQSXAGSHTLQWMHGCELGPDXRFLRGYEQFAYDGKDYLTLNEDLRSWTAVDTAAQISEQKSNDASEAEHQXXYLEDTCVEWLHKYLEKGKETLLHLEPPKTHVTHHPISDHEATLRCWALGFYPAEITLTWQQDGEGHTQDTELVETRPAGDGTFQKWAAVVVPSGEEXRYTCHVQHEGLXEPVTLRWKPASQPTIPI

SEQ ID NO: 33 - protein, 284 aa, Artificial sequence
  synthetic sequence
  misc_feature (7)..(7): Xaa is Y or F
  misc_feature (50)..(50): Xaa is P or Q
  misc_feature (251)..(251): Xaa is S or P
  misc_feature (278)..(278): Xaa is P or L
GSHSLRXFSTAVSRPGRGEPRYIAVEYVDDTQFLRFDSDAAIPRMEPREXWVEQEGPQYWEWTTGYAKANAQTDRVALRNLLRRYNQSEAGSHTLQGMNGCDMGPDGRLLRGYHQHAYDGKDYISLNEDLRSWTAADTVAQITQRFYEAEEYAEEFRTYLEGECLELLRRYLENGKETLQRADPPKAHVAHHPISDHEATLRCWALGFYPAEITLTWQRDGEEQTQDTELVETRPAGDGTFQKWAAVVVPXGEEQRYTCHVQHEGLPQPLILRWEQSXQPTIPI

SEQ ID NO: 34 - protein, 284 aa, Artificial sequence
  synthetic sequence
  misc_feature (13)..(13): Xaa is S or F
  misc_feature (27)..(27): Xaa is Y or H
  misc_feature (31)..(31): Xaa is T, S, or M
  misc_feature (34)..(34): Xaa is L or V
  misc_feature (54)..(54): Xaa is Q or R
  misc_feature (81)..(81): Xaa is P or L
  misc_feature (100)..(100): Xaa is G or D
  misc_feature (104)..(104): Xaa is G or V
  misc_feature (105)..(105): Xaa is S or C
  misc_feature (110)..(110): Xaa is L or I
  misc_feature (159)..(159): Xaa is Y or H
  misc_feature (169)..(169): Xaa is H or R
  misc_feature (171)..(171): Xaa is Y or H
  misc_feature (178)..(178): Xaa is M or T
  misc_feature (185)..(185): Xaa is P or A
  misc_feature (219)..(219): Xaa is R, W, or Q
  misc_feature (258)..(258): Xaa is T or M
  misc_feature (275)..(275): Xaa is K or E
GSHSMRYFSAAVXRPGRGEPRFIAMGXVDDXQFXRFDSDSACPRMEPRAPWVEXEGPEYWEEETRNTKAHAQTDRMNLQTXRGYYNQSEASSHTLQWMIXCDLXXDGRLXRGYEQYAYDGKDYLALNEDLRSWTAADTAAQISKRKCEAANVAEQRRAXLEGTCVEWLXRXLENGKEXLQRADPXKTHVTHHPVFDYEATLRCWALGFYPAEIILTWQXDGEDQTQDVELVETRPAGDGTFQKWAAVVVPSGEEQRYXCHVQHEGLPEPLMLRWXQSSLPTIPI

SEQ ID NO: 35 - protein, 276 aa, Artificial sequence; identical to SEQ ID NO: 29
  synthetic sequence
  Misc_feature (9)..(9): X is phenylalanine, tyrosine, serine, or threonine
  Misc_feature (44)..(44): X is lysine or arginine
  Misc_feature (62)..(62): X is glutamine, glycine, glutamic acid, or arginine
  Misc_feature (63)..(63): X is asparagine or glutamic acid
  Misc_feature (65)..(65): X is arginine or glycine
  Misc_feature (66)..(66): X is asparagine or lysine
  Misc_feature (67)..(67): X is methionine or valine
  Misc_feature (70)..(70): X is histidine or glutamine
  Misc_feature (73)..(73): X is threonine or isoleucine
  Misc_feature (74)..(74): X is aspartic acid or histidine
  Misc_feature (76)..(76): X is alanine, valine, or glutamic acid
  Misc_feature (77)..(77): X is asparagine or aspartic acid
  Misc_feature (79)..(79): X is glycine or arginine
  Misc_feature (80)..(80): X is threonine or arginine
  Misc_feature (81)..(81): X is leucine or alanine
  Misc_feature (82)..(82): X is arginine or leucine
  Misc_feature (83)..(83): X is glycine ir arginine
  Misc_feature (90)..(90): X is alanine or aspartic acid
  Misc_feature (95)..(95): X is isoleucine, leucine, or valine
  Misc_feature (97)..(97): X is isoleucine, arginine, or methionine
  Misc_feature (99)..(99): X is phenylalanine or tyrosine
  Misc_feature (105)..(105): X is serine or proline
  Misc_feature (107)..(107): X is tryptophan or glycine
  Misc_feature (114)..(114): X is arginine, histidine, or glutamine
  Misc_feature (116)..(116): X is aspartic acid or tyrosine
  Misc_feature (127)..(127): X is asparagine or lysine
  Misc_feature (142)..(142): X is threonine or isoleucine
  Misc_feature (144)..(144): X is lysine or glutamine
  Misc_feature (145)..(145): X is arginine or histidine
  Misc_feature (149)..(149): X is alanine or threonine
  Misc_feature (150)..(150): X is alanine or valine
  Misc_feature (151)..(151): X is histidine or arginine
  Misc_feature (156)..(156): X is arginine, leucine, glutamine, or tryptophan
  Misc_feature (158)..(158): X is valine or alanine
  Misc_feature (161)..(161): X is aspartic acid or glutamic acid
  Misc_feature (163)..(163): X is arginine or threonine
  Misc_feature (166)..(166): X is aspartic acid or glutamic acid
  Misc_feature (167)..(167): X is tryptophan or glycine
  Misc_feature (184)..(184): X is proline or alanine
  Misc_feature (193)..(193): X is proline or alanine
  Misc_feature (194)..(194): X is valine or isoleucine
  Misc_feature (207)..(207): X is serine or glycine
  Misc_feature (246)..(246): X is alanine or serine
  Misc_feature (253)..(253): X is glutamine or glutamic acid
  Misc_feature (276)..(276): X is proline or leucine

SEQ ID NO: 36 - protein, 276 aa, Artificial sequence; identical to SEQ ID NO: 30
  synthetic sequence
  Misc_feature (9)..(9): X is histidinem tyrosine, or aspartic acid
  Misc_feature (11)..(11): X is alanine or serine
  Misc_feature (12)..(12): X is methionine or valine
  Misc_feature (24)..(24): X is alanine, serine, or threonine
  Misc_feature (32)..(32): X is glutamie or leucine
  Misc_feature (41)..(41): X is alanine or threonine
  Misc_feature (45)..(45): X is glutamic acid, methionine, lysine, or threonine
  Misc_feature (46)..(46): X is alanine or threonine
  Misc_feature (63)..(63): X is glutamic acid or asparagine
  Misc_feature (66)..(66): X is isoleucine or lysine
  Misc_feature (67)..(67): X is tyrosine, phenylalanie, serine, or cystine
  Misc_feature (70)..(70): X is asparagine or glutamine
  Misc_feature (71)..(71): X is alanine or threonine
  Misc_feature (74)..(74): X is aspartic acid or tyrosine
  Misc_feature (76)..(76): X is glutamic acid or valine
  Misc_feature (77)..(77): X is serine or asparagine
  Misc_feature (80)..(80): X is threonine, asparagine, or isoleucine
  Misc_feature (81)..(81): X is alanine or leucine
  Misc_feature (82)..(82): X is leucine or arginine
  Misc_feature (83)..(83): X is arginine or glycine
  Misc_feature (94)..(94): X is threonine or isoleucine
  Misc_feature (95)..(95): X is leucine or isoleucine
  Misc_feature (97)..(97): X is arginine or serine
  Misc_feature (131)..(131): X is arginine or serine
  Misc_feature (143)..(143): X is S or T
  Misc_feature (147)..(147): X is L or W
  misc_feature (152)..(152): Xaa is E OR V
  misc_feature (156)..(156): Xaa is R, D, L
  misc_feature (158)..(158): Xaa A or T
  Misc_feature (163)..(163): X is leucine, glutamic acid, or threonine
  Misc_feature (177)..(177): X is glutamic acid or aspartic acid
  Misc_feature (178)..(178): X is lysine or threonine
  Misc_feature (180)..(180): X is glutamic acid or glutamine
  Misc_feature (194)..(194): X is isoleucine or valine

SEQ ID NO: 37 - protein, 276 aa, Artificial sequence; identical to SEQ ID NO: 31
  synthetic sequence
  Misc_feature (1)..(1): X is cysteine or glycine
  Misc_feature (6)..(6): X is arginine or lysine
  Misc_feature (9)..(9): X is phenylalanine, tyrosine, serine, or aspartic acid
  Misc_feature (14)..(14): X is arginine or tryptophan
  Misc_feature (21)..(21): X is histidine or arginine
  Misc_feature (24)..(24): X is alanine or serine
  Misc_feature (35)..(35): X is glutamine or arginine
  Misc_feature (49)..(49): X is alanine or arginine
  Misc_feature (66)..(66): X is asparagine, or lysine
  Misc_feature (73)..(73): X is threonine or alanine
  Misc_feature (77)..(77): X is serine or asparagine
  Misc_feature (80)..(80): X is asparagine or lysine
  Misc_feature (90)..(90): X is alanine or aspartic acid
  Misc_feature (91)..(91): X is glycine or arginine
  Misc_feature (94)..(94): X is threonine or isoleucine
  Misc_feature (95)..(95): X is leucine or isoleucine
  Misc_feature (97)..(97): X is tryptophan or arginine
  Misc_feature (99)..(99): X is cysteine, tyrosine, phenylalanine, or serine
  Misc_feature (103)..(103): X is leucine or valine
  Misc_feature (113)..(113): X is tyrosine or histidine
  Misc_feature (114)..(114): X is aspartic acid or asparagine
  Misc_feature (116)..(116): X is tyrosine, phenylalanine, serine, or leucine
  Misc_feature (147)..(147): X is leucine or tryptophan
  Misc_feature (152)..(152): X is glutamic acid, alanine, or threonine
  Misc_feature (156)..(156): X is arginine, leucine, or tryptophan
  Misc_feature (163)..(163): X is leucine or threonine
  Misc_feature (173)..(173): X is glutamic acid or lysine
  Misc_feature (177)..(177): X is glutamic acid or lysine
  Misc_feature (184)..(184): X is histidine or proline
  Misc_feature (194)..(194): X is arginine or valine
  Misc_feature (219)..(219): X is tryptophan or arginine
  Misc_feature (248)..(248): X is valine or methionine
  Misc_feature (253)..(253): X is glutamic acid or lysine
  Misc_feature (261)..(261): X is methionine or valine
  Misc_feature (267)..(267): X is proline or glutamine
  Misc_feature (273)..(273): X is arginine or serine
  Misc_feature (275)..(275): X is proline or glycine

SEQ ID NO: 38 - protein, 284 aa, Artificial sequence; identical to SEQ ID NO: 32
  synthetic sequence
  misc_feature (89)..(89): Xaa is K or E
  misc_feature (107)..(107): Xaa is R or G
  misc_feature (157)..(157): Xaa is R or G
  misc_feature (158)..(158): Xaa is A or V
  misc_feature (255)..(255): Xaa is Q or P
  misc_feature (267)..(267): Xaa is P or S

SEQ ID NO: 39 - protein, 284 aa, Artificial sequence; identical to SEQ ID NO: 33
  synthetic sequence
  misc_feature (7)..(7): Xaa is Y or F
  misc_feature (50)..(50): Xaa is P or Q
  misc_feature (251)..(251): Xaa is S or P
  misc_feature (278)..(278): Xaa is P or L

SEQ ID NO: 40 - protein, 284 aa, Artificial sequence; identical to SEQ ID NO: 34
  synthetic sequence
  misc_feature (13)..(13): Xaa is S or F
  misc_feature (27)..(27): Xaa is Y or H
  misc_feature (31)..(31): Xaa is T, S, or M
  misc_feature (34)..(34): Xaa is L or V
  misc_feature (54)..(54): Xaa is Q or R
  misc_feature (81)..(81): Xaa is P or L
  misc_feature (100)..(100): Xaa is G or D
  misc_feature (104)..(104): Xaa is G or V
  misc_feature (105)..(105): Xaa is S or C
  misc_feature (110)..(110): Xaa is L or I
  misc_feature (159)..(159): Xaa is Y or H
  misc_feature (169)..(169): Xaa is H or R
  misc_feature (171)..(171): Xaa is Y or H
  misc_feature (178)..(178): Xaa is M or T
  misc_feature (185)..(185): Xaa is P or A
  misc_feature (219)..(219): Xaa is R, W, or Q
  misc_feature (258)..(258): Xaa is T or M
  misc_feature (275)..(275): Xaa is K or E

SEQ ID NO: 41 - protein, 275 aa, Homo sapiens
GSHSMRYFFTSVSRPGRGEPRFIAVGYVDDTQFVRFDSDAASQKMEPRAPWIEQEGPEYWDQETRNMKAHSQTDRANLGTLRGYYNQSEDGSHTIQIMYGCDVGPDGRFLRGYRQDAYDGKDYIALNEDLRSWTAADMAAQITKRKWEAVHAAEQRRVYLEGRCVDGLRRYLENGKETLQRTDPPKTHMTHHPISDHEATLRCWALGFYPAEITLTWQRDGEDQTQDTELVETRPAGDGTFQKWAAVVVPSGEEQRYTCHVQHEGLPKPLTLRWE

SEQ ID NO: 42 - protein, 275 aa, Homo sapiens
GSHSMRYFYTSVSRPGRGEPRFISVGYVDDTQFVRFDSDAASPREEPRAPWIEQEGPEYWDRNTQIYKAQAQTDRESLRNLRGYYNQSEAGSHTLQSMYGCDVGPDGRLLRGHDQYAYDGKDYIALNEDLRSWTAADTAAQITQRKWEAAREAEQRRAYLEGECVEWLRRYLENGKDKLERADPPKTHVTHHPISDHEATLRCWALGFYPAEITLTWQRDGEDQTQDTELVETRPAGDRTFQKWAAVVVPSGEEQRYTCHVQHEGLPKPLTLRWE

SEQ ID NO: 43 - protein, 275 aa, Homo sapiens
CSHSMRYFDTAVSRPGRGEPRFISVGYVDDTQFVRFDSDAASPRGEPRAPWVEQEGPEYWDRETQNYKRQAQADRVSLRNLRGYYNQSEDGSHTLQRMYGCDLGPDGRLLRGYDQSAYDGKDYIALNEDLRSWTAADTAAQITQRKLEAARAAEQLRAYLEGTCVEWLRRYLENGKETLQRAEPPKTHVTHHPLSDHEATLRCWALGFYPAEITLTWQRDGEDQTQDTELVETRPAGDGTFQKWAAVVVPSGQEQRYTCHMQHEGLQEPLTLSWE

SEQ ID NO: 44 - protein, 276 aa, Homo sapiens [sequence omitted]

SEQ ID NO: 45 - protein, 274 aa, Mus musculus
GPHSLRYFVTAVSRPGLGEPRFIAVGYVDDTQFVRFDSDADNPRFEPRAPWMEQEGPEYWEEQTQRAKSDEQWFRVSLRTAQRYYNQSKGGSHTFQRMFGCDVGSDWRLLRGYQQFAYDGRDYIALNEDLKTWTAADTAALITRRKWEQAGDAEYYRAYLEGECVEWLRRYLELGNETLLRTDSPKAHVTYHPRSQVDVTLRCWALGFYPADITLTWQLNGEDLTQDMELVETRPAGDGTFQKWAAVVVPLGKEQNYTCHVHHKGLPEPLTLRW

SEQ ID NO: 46 - protein, 275 aa, Artificial sequence
  synthetic sequence
GSHSMRYFFTSVSRPGRGEPRFIAVGYVDDTQFVRFDSDAASQRMEPRAPWIEQEGPEYWDGETRKVKAHSQTHRVDLGTLRGAYNQSEAGSHTVQRMYGCDVGSDWRFLRGYHQYAYDGKDYIALKEDLRSWTAADMAAQTTKHKWEAAHVAEQLRAYLEGTCVEWLRRYLENGKETLQRTDAPKTHMTHHAVSDHEATLRCWALSFYPAEITLTWQRDGEDQTQDTELVETRPCGDGTFQKWAAVVVPSGQEQRYTCHVQHEGLPKPLTLRWE

SEQ ID NO: 47 - protein, 275 aa, Artificial sequence
  synthetic sequence
GSHSMRYFFTSVSRPGRGEPRFIAVGYVDDTQFVRFDSDAASQRMEPRAPWIEQEGPEYWDGETRKVKAHSQTHRVDLGTLRGCYNQSEAGSHTVQRMYGCDVGSDWRFLRGYHQYAYDGKDYIALKEDLRSWTAADMCAQTTKHKWEAAHVAEQLRAYLEGTCVEWLRRYLENGKETLQRTDAPKTHMTHHAVSDHEATLRCWALSFYPAEITLTWQRDGEDQTQDTELVETRPCGDGTFQKWAAVVVPSGQEQRYTCHVQHEGLPKPLTLRWE

SEQ ID NO: 48 - protein, 276 aa, Artificial sequence
  synthetic sequence
GSHSMRYFFTSVSRPGRGEPRFIAVGYVDDTQFVRFDSDAASQRMEPRAPWIEQEGPEYWDGETRKVKAHSQTHRVDLGTLRGAYNQSEAGSHTVQRMYGCDVGSDWRFLRGYHQYAYDGKDYIALKEDLRSWTAADMAAQTTKHKWEAAHVAEQLRAYLEGTCVEWLRRYLENGKETLQRTDAPKTHMTHHAVSDHEATLRCWALSFYPAEITLTWQRDGEDQTQDTELVETRPCGDGTFQKWAAVVVPSGQEQRYTCHVQHEGLPKPLTLRWEP

SEQ ID NO: 49 - protein, 276 aa, Homo sapiens
GSHSMRYFYTSVSRPGRGEPRFIAVGYVDDTQFVRFDSDAASQRMEPRAPWIEQEGPEYWDQETRNVKAQSQTDRVDLGTLRGYYNQSEDGSHTIQIMYGCDVGPDGRFLRGYRQDAYDGKDYIALNEDLRSWTAADMAAQITKRKWEAAHAAEQQRAYLEGRCVEWLRRYLENGKETLQRTDPPKTHMTHHPISDHEATLRCWALGFYPAEITLTWQRDGEDQTQDTELVETRPAGDGTFQKWAAVVVPSGEEQRYTCHVQHEGLPKPLTLRWEL

SEQ ID NO: 50 - protein, 276 aa, Homo sapiens
GSHSMRYFSTSVSRPGRGEPRFIAVGYVDDTQFVRFDSDAASQRMEPRAPWIEQEGPEYWDEETGKVKAHSQTDRENLRIALRYYNQSEAGSHTLQMMFGCDVGSDGRFLRGYHQYAYDGKDYIALKEDLRSWTAADMAAQITKRKWEAAHVAEQQRAYLEGTCVDGLRRYLENGKETLQRTDPPKTHMTHHPISDHEATLRCWALGFYPAEITLTWQRDGEDQTQDTELVETRPAGDGTFQKWAAVVVPSGEEQRYTCHVQHEGLPKPLTLRWEP

SEQ ID NO: 51 - protein, 276 aa, Homo sapiens
GSHSMRYFTTSVSRPGRGEPRFIAVGYVDDTQFVRFDSDAASQRMEPRAPWIEQEGPEYWDRNTRNVKAHSQIDRVDLGTLRGYYNQSEAGSHTIQMMYGCDVGSDGRFLRGYQQDAYDGKDYIALNEDLRSWTAADMAAQITQRKWEAARVAEQLRAYLEGTCVEWLRRYLENGKETLQRTDPPKTHMTHHAVSDHEATLRCWALSFYPAEITLTWQRDGEDQTQDTELVETRPAGDGTFQKWASVVVPSGQEQRYTCHVQHEGLPKPLTLRWEP

SEQ ID NO: 52 - protein, 219 aa, Artificial sequence
  synthetic sequence
  misc_feature (8)..(8): any amino acid other than aspartic acid
FTVTVPKXLYVVEYGSNMTIECKFPVEKQLDLAALIVYWEMEDKNIIQFVHGEEDLKVQHSSYRQRARLLKDQLSLGNAALQITDVKLQDAGVYRCMISYGGADYKRITVKVNAPYNKINQRILVVDPVTSEHELTCQAEGYPKAEVIWTSSDHQVLSGKTTTTNSKREEKLFNVTSTLRINTTTNEIFYCTFRRLDPEENHTAELVIPGNILNVSIKI

SEQ ID NO: 53 - protein, 219 aa, Artificial sequence
  synthetic sequence
  misc_feature (36)..(36): any amino acid other than isoleucine
FTVTVPKDLYVVEYGSNMTIECKFPVEKQLDLAALXVYWEMEDKNIIQFVHGEEDLKVQHSSYRQRARLLKDQLSLGNAALQITDVKLQDAGVYRCMISYGGADYKRITVKVNAPYNKINQRILVVDPVTSEHELTCQAEGYPKAEVIWTSSDHQVLSGKTTTTNSKREEKLFNVTSTLRINTTTNEIFYCTFRRLDPEENHTAELVIPGNILNVSIKI

SEQ ID NO: 54 - protein, 219 aa, Artificial sequence
  synthetic sequence
  misc_feature (54)..(54): any amino acid other than glutamine
FTVTVPKDLYVVEYGSNMTIECKFPVEKQLDLAALIVYWEMEDKNIIQFVHGEXDLKVQHSSYRQRARLLKDQLSLGNAALQITDVKLQDAGVYRCMISYGGADYKRITVKVNAPYNKINQRILVVDPVTSEHELTCQAEGYPKAEVIWTSSDHQVLSGKTTTTNSKREEKLFNVTSTLRINTTTNEIFYCTFRRLDPEENHTAELVIPGNILNVSIKI

SEQ ID NO: 55 - protein, 208 aa, Artificial sequence
  synthetic sequence
  misc_feature (19)..(19): any amino acid other than asparagine
VIHVTKEVKEVATLSCGHXVSVEELAQTRIYWQKEKKMVLTMMSGDMNIWPEYKNRTIFDITNNLSIVILALRPSDEGTYECVVLKYEKDAFKREHLAEVTLSVKADFPTPSISDFEIPTSNIRRIICSTSGGFPEPHLSWLENGEELNAINTTVSQDPETELYAVSSKLDFNMTTNHSFMCLIKYGHLRVNQTFNWNTTKQEHFPDN

SEQ ID NO: 56 - protein, 208 aa, Artificial sequence
  synthetic sequence
  misc_feature (63)..(63): any amino acid other than asparagine
VIHVTKEVKEVATLSCGHNVSVEELAQTRIYWQKEKKMVLTMMSGDMNIWPEYKNRTIFDITXNLSIVILALRPSDEGTYECVVLKYEKDAFKREHLAEVTLSVKADFPTPSISDFEIPTSNIRRIICSTSGGFPEPHLSWLENGEELNAINTTVSQDPETELYAVSSKLDFNMTTNHSFMCLIKYGHLRVNQTFNWNTTKQEHFPDN

SEQ ID NO: 57 - protein, 208 aa, Artificial sequence
  synthetic sequence
  misc_feature (67)..(67): any amino acid other than isoleucine
VIHVTKEVKEVATLSCGHNVSVEELAQTRIYWQKEKKMVLTMMSGDMNIWPEYKNRTIFDITNNLSXVILALRPSDEGTYECVVLKYEKDAFKREHLAEVTLSVKADFPTPSISDFEIPTSNIRRIICSTSGGFPEPHLSWLENGEELNAINTTVSQDPETELYAVSSKLDFNMTTNHSFMCLIKYGHLRVNQTFNWNTTKQEHFPDN

SEQ ID NO: 58 - protein, 208 aa, Artificial sequence
  synthetic sequence
  misc_feature (86)..(86): any amino acid other than lysine
VIHVTKEVKEVATLSCGHNVSVEELAQTRIYWQKEKKMVLTMMSGDMNIWPEYKNRTIFDITNNLSIVILALRPSDEGTYECVVLXYEKDAFKREHLAEVTLSVKADFPTPSISDFEIPTSNIRRIICSTSGGFPEPHLSWLENGEELNAINTTVSQDPETELYAVSSKLDFNMTTNHSFMCLIKYGHLRVNQTFNWNTTKQEHFPDN

SEQ ID NO: 59 - protein, 5 aa, Artificial sequence
  synthetic sequence
  misc_feature (4)..(4): any amino acid other than proline
VPGXG

SEQ ID NO: 60 - protein, 208 aa, Artificial sequence
  synthetic sequence
  misc_feature (157)..(157): any amino acid other than glutamine
VIHVTKEVKEVATLSCGHNVSVEELAQTRIYWQKEKKMVLTMMSGDMNIWPEYKNRTIFDITNNLSIVILALRPSDEGTYECVVLKYEKDAFKREHLAEVTLSVKADFPTPSISDFEIPTSNIRRIICSTSGGFPEPHLSWLENGEELNAINTTVSXDPETELYAVSSKLDFNMTTNHSFMCLIKYGHLRVNQTFNWNTTKQEHFPDN

SEQ ID NO: 61 - protein, 208 aa, Artificial sequence
  synthetic sequence
  misc_feature (158)..(158): any amino acid other than aspartic acid
VIHVTKEVKEVATLSCGHNVSVEELAQTRIYWQKEKKMVLTMMSGDMNIWPEYKNRTIFDITNNLSIVILALRPSDEGTYECVVLKYEKDAFKREHLAEVTLSVKADFPTPSISDFEIPTSNIRRIICSTSGGFPEPHLSWLENGEELNAINTTVSQXPETELYAVSSKLDFNMTTNHSFMCLIKYGHLRVNQTFNWNTTKQEHFPDN

SEQ ID NO: 62 - protein, 208 aa, Artificial sequence
  synthetic sequence
  misc_feature (25)..(25): any amino acid other than leucine
VIHVTKEVKEVATLSCGHNVSVEEXAQTRIYWQKEKKMVLTMMSGDMNIWPEYKNRTIFDITNNLSIVILALRPSDEGTYECVVLKYEKDAFKREHLAEVTLSVKADFPTPSISDFEIPTSNIRRIICSTSGGFPEPHLSWLENGEELNAINTTVSQDPETELYAVSSKLDFNMTTNHSFMCLIKYGHLRVNQTFNWNTTKQEHFPDN

SEQ ID NO: 63 - protein, 208 aa, Artificial sequence
  synthetic sequence
  misc_feature (31)..(31): any amino acid other than tyrosine
VIHVTKEVKEVATLSCGHNVSVEELAQTRIXWQKEKKMVLTMMSGDMNIWPEYKNRTIFDITNNLSIVILALRPSDEGTYECVVLKYEKDAFKREHLAEVTLSVKADFPTPSISDFEIPTSNIRRIICSTSGGFPEPHLSWLENGEELNAINTTVSQDPETELYAVSSKLDFNMTTNHSFMCLIKYGHLRVNQTFNWNTTKQEHFPDN

SEQ ID NO: 64 - protein, 208 aa, Artificial sequence
  synthetic sequence
  misc_feature (33)..(33): any amino acid other than glutamine
VIHVTKEVKEVATLSCGHNVSVEELAQTRIYWXKEKKMVLTMMSGDMNIWPEYKNRTIFDITNNLSIVILALRPSDEGTYECVVLKYEKDAFKREHLAEVTLSVKADFPTPSISDFEIPTSNIRRIICSTSGGFPEPHLSWLENGEELNAINTTVSQDPETELYAVSSKLDFNMTTNHSFMCLIKYGHLRVNQTFNWNTTKQEHFPDN

SEQ ID NO: 65 - protein, 208 aa, Artificial sequence
  synthetic sequence
  misc_feature (38)..(38): any amino acid other than methionine
VIHVTKEVKEVATLSCGHNVSVEELAQTRIYWQKEKKXVLTMMSGDMNIWPEYKNRTIFDITNNLSIVILALRPSDEGTYECVVLKYEKDAFKREHLAEVTLSVKADFPTPSISDFEIPTSNIRRIICSTSGGFPEPHLSWLENGEELNAINTTVSQDPETELYAVSSKLDFNMTTNHSFMCLIKYGHLRVNQTFNWNTTKQEHFPDN

SEQ ID NO: 66 - protein, 208 aa, Artificial sequence
  synthetic sequence
  misc_feature (39)..(39): any amino acid other than valine
VIHVTKEVKEVATLSCGHNVSVEELAQTRIYWQKEKKMXLTMMSGDMNIWPEYKNRTIFDITNNLSIVILALRPSDEGTYECVVLKYEKDAFKREHLAEVTLSVKADFPTPSISDFEIPTSNIRRIICSTSGGFPEPHLSWLENGEELNAINTTVSQDPETELYAVSSKLDFNMTTNHSFMCLIKYGHLRVNQTFNWNTTKQEHFPDN

SEQ ID NO: 67 - protein, 208 aa, Artificial sequence
  synthetic sequence
  misc_feature (49)..(49): any amino acid other than isoleucine
VIHVTKEVKEVATLSCGHNVSVEELAQTRIYWQKEKKMVLTMMSGDMNXWPEYKNRTIFDITNNLSIVILALRPSDEGTYECVVLKYEKDAFKREHLAEVTLSVKADFPTPSISDFEIPTSNIRRIICSTSGGFPEPHLSWLENGEELNAINTTVSQDPETELYAVSSKLDFNMTTNHSFMCLIKYGHLRVNQTFNWNTTKQEHFPDN

SEQ ID NO: 68 - protein, 208 aa, Artificial sequence
  synthetic sequence
  misc_feature (53)..(53): any amino acid other than tyrosine
VIHVTKEVKEVATLSCGHNVSVEELAQTRIYWQKEKKMVLTMMSGDMNIWPEXKNRTIFDITNNLSIVILALRPSDEGTYECVVLKYEKDAFKREHLAEVTLSVKADFPTPSISDFEIPTSNIRRIICSTSGGFPEPHLSWLENGEELNAINTTVSQDPETELYAVSSKLDFNMTTNHSFMCLIKYGHLRVNQTFNWNTTKQEHFPDN

SEQ ID NO: 69 - protein, 208 aa, Artificial sequence
  synthetic sequence
  misc_feature (60)..(60): any amino acid other than aspartic acid
VIHVTKEVKEVATLSCGHNVSVEELAQTRIYWQKEKKMVLTMMSGDMNIWPEYKNRTIFXITNNLSIVILALRPSDEGTYECVVLKYEKDAFKREHLAEVTLSVKADFPTPSISDFEIPTSNIRRIICSTSGGFPEPHLSWLENGEELNAINTTVSQDPETELYAVSSKLDFNMTTNHSFMCLIKYGHLRVNQTFNWNTTKQEHFPDN

SEQ ID NO: 70 - protein, 208 aa, Artificial sequence
  synthetic sequence
  misc_feature (108)..(108): any amino acid other than phenylalanine
VIHVTKEVKEVATLSCGHNVSVEELAQTRIYWQKEKKMVLTMMSGDMNIWPEYKNRTIFDITNNLSIVILALRPSDEGTYECVVLKYEKDAFKREHLAEVTLSVKADXPTPSISDFEIPTSNIRRIICSTSGGFPEPHLSWLENGEELNAINTTVSQDPETELYAVSSKLDFNMTTNHSFMCLIKYGHLRVNQTFNWNTTKQEHFPDN

SEQ ID NO: 71 - protein, 208 aa, Artificial sequence
  synthetic sequence
  misc_feature (156)..(156): any amino acid other than serine
VIHVTKEVKEVATLSCGHNVSVEELAQTRIYWQKEKKMVLTMMSGDMNIWPEYKNRTIFDITNNLSIVILALRPSDEGTYECVVLKYEKDAFKREHLAEVTLSVKADFPTPSISDFEIPTSNIRRIICSTSGGFPEPHLSWLENGEELNAINTTVXQDPETELYAVSSKLDFNMTTNHSFMCLIKYGHLRVNQTFNWNTTKQEHFPDN

SEQ ID NO: 72 - protein, 208 aa, Artificial sequence
  synthetic sequence
  misc_feature (111)..(111): any amino acid other than proline
VIHVTKEVKEVATLSCGHNVSVEELAQTRIYWQKEKKMVLTMMSGDMNIWPEYKNRTIFDITNNLSIVILALRPSDEGTYECVVLKYEKDAFKREHLAEVTLSVKADFPTXSISDFEIPTSNIRRIICSTSGGFPEPHLSWLENGEELNAINTTVSQDPETELYAVSSKLDFNMTTNHSFMCLIKYGHLRVNQTFNWNTTKQEHFPDN

SEQ ID NO: 73 - protein, 224 aa, Artificial sequence
  synthetic sequence
  misc_feature (61)..(61): any amino acid other than asparagine
APLKIQAYFNETADLPCQFANSQNQSLSELVVFWQDQENLVLNEVYLGKEKFDSVHSKYMXRTSFDSDSWTLRLHNLQIKDKGLYQCIIHHKKPTGMIRIHQMNSELSVLANFSQPEIVPISNITENVYINLTCSSIHGYPEPKKMSVLLRTKNSTIEYDGIMQKSQDNVTELYDVSISLSVSFPDVTSNMTIFCILETDKTRLLSSPFSIELEDPQPPPDHIP

SEQ ID NO: 74 - protein, 224 aa, Artificial sequence
  synthetic sequence
  misc_feature (66)..(66): any amino acid other than aspartic acid
APLKIQAYFNETADLPCQFANSQNQSLSELVVFWQDQENLVLNEVYLGKEKFDSVHSKYMNRTSFXSDSWTLRLHNLQIKDKGLYQCIIHHKKPTGMIRIHQMNSELSVLANFSQPEIVPISNITENVYINLTCSSIHGYPEPKKMSVLLRTKNSTIEYDGIMQKSQDNVTELYDVSISLSVSFPDVTSNMTIFCILETDKTRLLSSPFSIELEDPQPPPDHIP

SEQ ID NO: 75 - protein, 224 aa, Artificial sequence
  synthetic sequence
  misc_feature (70)..(70): any amino acid other than tryptophan
APLKIQAYFNETADLPCQFANSQNQSLSELVVFWQDQENLVLNEVYLGKEKFDSVHSKYMNRTSFDSDSXTLRLHNLQIKDKGLYQCIIHHKKPTGMIRIHQMNSELSVLANFSQPEIVPISNITENVYINLTCSSIHGYPEPKKMSVLLRTKNSTIEYDGIMQKSQDNVTELYDVSISLSVSFPDVTSNMTIFCILETDKTRLLSSPFSIELEDPQPPPDHIP

SEQ ID NO: 76 - protein, 224 aa, Artificial sequence
  synthetic sequence
  misc_feature (91)..(91): any amino acid other than histidine
APLKIQAYFNETADLPCQFANSQNQSLSELVVFWQDQENLVLNEVYLGKEKFDSVHSKYMNRTSFDSDSWTLRLHNLQIKDKGLYQCIIHXKKPTGMIRIHQMNSELSVLANFSQPEIVPISNITENVYINLTCSSIHGYPEPKKMSVLLRTKNSTIEYDGIMQKSQDNVTELYDVSISLSVSFPDVTSNMTIFCILETDKTRLLSSPFSIELEDPQPPPDHIP

SEQ ID NO: 77 - protein, 110 aa, Artificial sequence
  synthetic sequence
  misc_feature (61)..(61): any amino acid other than asparagine
APLKIQAYFNETADLPCQFANSQNQSLSELVVFWQDQENLVLNEVYLGKEKFDSVHSKYMXRTSFDSDSWTLRLHNLQIKDKGLYQCIIHHKKPTGMIRIHQMNSELSVL

SEQ ID NO: 78 - protein, 110 aa, Artificial sequence
  synthetic sequence
  misc_feature (66)..(66): any amino acid other than aspartic acid
APLKIQAYFNETADLPCQFANSQNQSLSELVVFWQDQENLVLNEVYLGKEKFDSVHSKYMNRTSFXSDSWTLRLHNLQIKDKGLYQCIIHHKKPTGMIRIHQMNSELSVL

SEQ ID NO: 79 - protein, 110 aa, Artificial sequence
  synthetic sequence
  misc_feature (70)..(70): any amino acid other than tryptophan
APLKIQAYFNETADLPCQFANSQNQSLSELVVFWQDQENLVLNEVYLGKEKFDSVHSKYMNRTSFDSDSXTLRLHNLQIKDKGLYQCIIHHKKPTGMIRIHQMNSELSVL

SEQ ID NO: 80 - protein, 110 aa, Artificial sequence
  synthetic sequence
  misc_feature (91)..(91): any amino acid other than histidine
APLKIQAYFNETADLPCQFANSQNQSLSELVVFWQDQENLVLNEVYLGKEKFDSVHSKYMNRTSFDSDSWTLRLHNLQIKDKGLYQCIIHXKKPTGMIRIHQMNSELSVL

SEQ ID NO: 81 - protein, 224 aa, Artificial sequence
  synthetic sequence
  misc_feature (41)..(41): any amino acid other than valine
APLKIQAYFNETADLPCQFANSQNQSLSELVVFWQDQENLXLNEVYLGKEKFDSVHSKYMNRTSFDSDSWTLRLHNLQIKDKGLYQCIIHHKKPTGMIRIHQMNSELSVLANFSQPEIVPISNITENVYINLTCSSIHGYPEPKKMSVLLRTKNSTIEYDGIMQKSQDNVTELYDVSISLSVSFPDVTSNMTIFCILETDKTRLLSSPFSIELEDPQPPPDHIP

SEQ ID NO: 82 - protein, 110 aa, Artificial sequence
  synthetic sequence
  misc_feature (41)..(41): any amino acid other than valine
APLKIQAYFNETADLPCQFANSQNQSLSELVVFWQDQENLXLNEVYLGKEKFDSVHSKYMNRTSFDSDSWTLRLHNLQIKDKGLYQCIIHHKKPTGMIRIHQMNSELSVL

SEQ ID NO: 83 - protein, 224 aa, Artificial sequence
  synthetic sequence
  misc_feature (35)..(35): any amino acid other than glutamine
APLKIQAYFNETADLPCQFANSQNQSLSELVVFWXDQENLVLNEVYLGKEKFDSVHSKYMNRTSFDSDSWTLRLHNLQIKDKGLYQCIIHHKKPTGMIRIHQMNSELSVLANFSQPEIVPISNITENVYINLTCSSIHGYPEPKKMSVLLRTKNSTIEYDGIMQKSQDNVTELYDVSISLSVSFPDVTSNMTIFCILETDKTRLLSSPFSIELEDPQPPPDHIP

SEQ ID NO: 84 - protein, 110 aa, Artificial sequence
  synthetic sequence
  misc_feature (35)..(35): any amino acid other than glutamine
APLKIQAYFNETADLPCQFANSQNQSLSELVVFWXDQENLVLNEVYLGKEKFDSVHSKYMNRTSFDSDSWTLRLHNLQIKDKGLYQCIIHHKKPTGMIRIHQMNSELSVL

SEQ ID NO: 85 - protein, 224 aa, Artificial sequence
  synthetic sequence
  misc_feature (33)..(33): any amino acid other than phenylalanine
APLKIQAYFNETADLPCQFANSQNQSLSELVVXWQDQENLVLNEVYLGKEKFDSVHSKYMNRTSFDSDSWTLRLHNLQIKDKGLYQCIIHHKKPTGMIRIHQMNSELSVLANFSQPEIVPISNITENVYINLTCSSIHGYPEPKKMSVLLRTKNSTIEYDGIMQKSQDNVTELYDVSISLSVSFPDVTSNMTIFCILETDKTRLLSSPFSIELEDPQPPPDHIP

SEQ ID NO: 86 - protein, 110 aa, Artificial sequence
  synthetic sequence
  misc_feature (33)..(33): any amino acid other than phenylalanine
APLKIQAYFNETADLPCQFANSQNQSLSELVVXWQDQENLVLNEVYLGKEKFDSVHSKYMNRTSFDSDSWTLRLHNLQIKDKGLYQCIIHHKKPTGMIRIHQMNSELSVL

SEQ ID NO: 87 - protein, 224 aa, Artificial sequence
  synthetic sequence
  misc_feature (72)..(72): any amino acid other than leucine
APLKIQAYFNETADLPCQFANSQNQSLSELVVFWQDQENLVLNEVYLGKEKFDSVHSKYMNRTSFDSDSWTXRLHNLQIKDKGLYQCIIHHKKPTGMIRIHQMNSELSVLANFSQPEIVPISNITENVYINLTCSSIHGYPEPKKMSVLLRTKNSTIEYDGIMQKSQDNVTELYDVSISLSVSFPDVTSNMTIFCILETDKTRLLSSPFSIELEDPQPPPDHIP

SEQ ID NO: 88 - protein, 110 aa, Artificial sequence
  synthetic sequence
  misc_feature (72)..(72): any amino acid other than leucine
APLKIQAYFNETADLPCQFANSQNQSLSELVVFWQDQENLVLNEVYLGKEKFDSVHSKYMNRTSFDSDSWTXRLHNLQIKDKGLYQCIIHHKKPTGMIRIHQMNSELSVL

SEQ ID NO: 89 - protein, 224 aa, Artificial sequence
  synthetic sequence
  misc_feature (59)..(59): any amino acid other than tyrosine
APLKIQAYFNETADLPCQFANSQNQSLSELVVFWQDQENLVLNEVYLGKEKFDSVHSKXMNRTSFDSDSWTLRLHNLQIKDKGLYQCIIHHKKPTGMIRIHQMNSELSVLANFSQPEIVPISNITENVYINLTCSSIHGYPEPKKMSVLLRTKNSTIEYDGIMQKSQDNVTELYDVSISLSVSFPDVTSNMTIFCILETDKTRLLSSPFSIELEDPQPPPDHIP

SEQ ID NO: 90 - protein, 110 aa, Artificial sequence
  synthetic sequence
  misc_feature (59)..(59): any amino acid other than tyrosine
APLKIQAYFNETADLPCQFANSQNQSLSELVVFWQDQENLVLNEVYLGKEKFDSVHSKXMNRTSFDSDSWTLRLHNLQIKDKGLYQCIIHHKKPTGMIRIHQMNSELSVL

SEQ ID NO: 91 - protein, 224 aa, Artificial sequence
  synthetic sequence
  misc_feature (61)..(61): any amino acid other than asparagine
  misc_feature (91)..(91): any amino acid other than histidine
APLKIQAYFNETADLPCQFANSQNQSLSELVVFWQDQENLVLNEVYLGKEKFDSVHSKYMXRTSFDSDSWTLRLHNLQIKDKGLYQCIIHXKKPTGMIRIHQMNSELSVLANFSQPEIVPISNITENVYINLTCSSIHGYPEPKKMSVLLRTKNSTIEYDGIMQKSQDNVTELYDVSISLSVSFPDVTSNMTIFCILETDKTRLLSSPFSIELEDPQPPPDHIP

SEQ ID NO: 92 - protein, 110 aa, Artificial sequence
  synthetic sequence
  misc_feature (61)..(61): any amino acid other than asparagine
  misc_feature (91)..(91): any amino acid other than histidine
APLKIQAYFNETADLPCQFANSQNQSLSELVVFWQDQENLVLNEVYLGKEKFDSVHSKYMXRTSFDSDSWTLRLHNLQIKDKGLYQCIIHXKKPTGMIRIHQMNSELSVL

SEQ ID NO: 93 - protein, 224 aa, Artificial sequence
  synthetic sequence
  misc_feature (66)..(66): any amino acid other than aspartic acid
  misc_feature (91)..(91): any amino acid other than histidine
APLKIQAYFNETADLPCQFANSQNQSLSELVVFWQDQENLVLNEVYLGKEKFDSVHSKYMNRTSFXSDSWTLRLHNLQIKDKGLYQCIIHXKKPTGMIRIHQMNSELSVLANFSQPEIVPISNITENVYINLTCSSIHGYPEPKKMSVLLRTKNSTIEYDGIMQKSQDNVTELYDVSISLSVSFPDVTSNMTIFCILETDKTRLLSSPFSIELEDPQPPPDHIP

SEQ ID NO: 94 - protein, 110 aa, Artificial sequence
  synthetic sequence
  misc_feature (66)..(66): any amino acid other than asparagine
  misc_feature (91)..(91): Xaa can be any amino acid other than His
APLKIQAYFNETADLPCQFANSQNQSLSELVVFWQDQENLVLNEVYLGKEKFDSVHSKYMNRTSFXSDSWTLRLHNLQIKDKGLYQCIIHXKKPTGMIRIHQMNSELSVL

SEQ ID NO: 95 - protein, 224 aa, Artificial sequence
  synthetic sequence
  Misc_feature (61)..(61): any amino acid other than asparagine
  Misc_feature (66)..(66): any amino acid other than aspartic acid
  Misc_feature (91)..(91): any amino acid other than histidine
APLKIQAYFNETADLPCQFANSQNQSLSELVVFWQDQENLVLNEVYLGKEKFDSVHSKYMXRTSFXSDSWTLRLHNLQIKDKGLYQCIIHXKKPTGMIRIHQMNSELSVLANFSQPEIVPISNITENVYINLTCSSIHGYPEPKKMSVLLRTKNSTIEYDGIMQKSQDNVTELYDVSISLSVSFPDVTSNMTIFCILETDKTRLLSSPFSIELEDPQPPPDHIP

SEQ ID NO: 96 - protein, 110 aa, Artificial sequence
  synthetic sequence
  Misc_feature (61)..(61): any amino acid other than asparagine
  Misc_feature (66)..(66): any amino acid other than aspartic acid
  Misc_feature (91)..(91): any amino acid other than histidine
APLKIQAYFNETADLPCQFANSQNQSLSELVVFWQDQENLVLNEVYLGKEKFDSVHSKYMXRTSFXSDSWTLRLHNLQIKDKGLYQCIIHXKKPTGMIRIHQMNSELSVL

SEQ ID NO: 97 - protein, 174 aa, Artificial sequence
  synthetic sequence
  misc_feature (47)..(47): any amino acid other than lysine
PAGLLDLRQGMFAQLVAQNVLLIDGPLSWYSDPGLAGVSLTGGLSYXEDTKELVVAKAGVYYVFFQLELRRVVAGEGSGSVSLALHLQPLRSAAGAAALALTVDLPPASSEARNSAFGFQGRLLHLSAGQRLGVHLHTEARARHAWQLTQGATVLGLFRVTPEIPAGLPSPRSE

SEQ ID NO: 98 - protein, 174 aa, Artificial sequence
  synthetic sequence
  misc_feature (147)..(147): any amino acid other than glutamine
PAGLLDLRQGMFAQLVAQNVLLIDGPLSWYSDPGLAGVSLTGGLSYKEDTKELVVAKAGVYYVFFQLELRRVVAGEGSGSVSLALHLQPLRSAAGAAALALTVDLPPASSEARNSAFGFQGRLLHLSAGQRLGVHLHTEARARHAWXLTQGATVLGLFRVTPEIPAGLPSPRSE

SEQ ID NO: 99 - protein, 174 aa, Artificial sequence
  synthetic sequence
  misc_feature (11)..(11): any amino acid other than methionine
PAGLLDLRQGXFAQLVAQNVLLIDGPLSWYSDPGLAGVSLTGGLSYKEDTKELVVAKAGVYYVFFQLELRRVVAGEGSGSVSLALHLQPLRSAAGAAALALTVDLPPASSEARNSAFGFQGRLLHLSAGQRLGVHLHTEARARHAWQLTQGATVLGLFRVTPEIPAGLPSPRSE

SEQ ID NO: 100 - protein, 174 aa, Artificial sequence
  synthetic sequence
  misc_feature (12)..(12): any amino acid other than phenylalanine
PAGLLDLRQGMXAQLVAQNVLLIDGPLSWYSDPGLAGVSLTGGLSYKEDTKELVVAKAGVYYVFFQLELRRVVAGEGSGSVSLALHLQPLRSAAGAAALALTVDLPPASSEARNSAFGFQGRLLHLSAGQRLGVHLHTEARARHAWQLTQGATVLGLFRVTPEIPAGLPSPRSE

SEQ ID NO: 101 - protein, 174 aa, Artificial sequence
  synthetic sequence
  misc_feature (14)..(14): any amino acid other than glutamine
PAGLLDLRQGMFAXLVAQNVLLIDGPLSWYSDPGLAGVSLTGGLSYKEDTKELVVAKAGVYYVFFQLELRRVVAGEGSGSVSLALHLQPLRSAAGAAALALTVDLPPASSEARNSAFGFQGRLLHLSAGQRLGVHLHTEARARHAWQLTQGATVLGLFRVTPEIPAGLPSPRSE

SEQ ID NO: 102 - protein, 174 aa, Artificial sequence
  synthetic sequence
  misc_feature (15)..(15): any amino acid other than leucine
PAGLLDLRQGMFAQXVAQNVLLIDGPLSWYSDPGLAGVSLTGGLSYKEDTKELVVAKAGVYYVFFQLELRRVVAGEGSGSVSLALHLQPLRSAAGAAALALTVDLPPASSEARNSAFGFQGRLLHLSAGQRLGVHLHTEARARHAWQLTQGATVLGLFRVTPEIPAGLPSPRSE

SEQ ID NO: 103 - protein, 174 aa, Artificial sequence
  synthetic sequence
  misc_feature (16)..(16): any amino acid other than valine
PAGLLDLRQGMFAQLXAQNVLLIDGPLSWYSDPGLAGVSLTGGLSYKEDTKELVVAKAGVYYVFFQLELRRVVAGEGSGSVSLALHLQPLRSAAGAAALALTVDLPPASSEARNSAFGFQGRLLHLSAGQRLGVHLHTEARARHAWQLTQGATVLGLFRVTPEIPAGLPSPRSE

SEQ ID NO: 104 - protein, 174 aa, Artificial sequence
  synthetic sequence
  misc_feature (18)..(18): any amino acid other than glutamine
PAGLLDLRQGMFAQLVAXNVLLIDGPLSWYSDPGLAGVSLTGGLSYKEDTKELVVAKAGVYYVFFQLELRRVVAGEGSGSVSLALHLQPLRSAAGAAALALTVDLPPASSEARNSAFGFQGRLLHLSAGQRLGVHLHTEARARHAWQLTQGATVLGLFRVTPEIPAGLPSPRSE

SEQ ID NO: 105 - protein, 174 aa, Artificial sequence
  synthetic sequence
  misc_feature (19)..(19): any amino acid other than asparagined
PAGLLDLRQGMFAQLVAQXVLLIDGPLSWYSDPGLAGVSLTGGLSYKEDTKELVVAKAGVYYVFFQLELRRVVAGEGSGSVSLALHLQPLRSAAGAAALALTVDLPPASSEARNSAFGFQGRLLHLSAGQRLGVHLHTEARARHAWQLTQGATVLGLFRVTPEIPAGLPSPRSE

SEQ ID NO: 106 - protein, 174 aa, Artificial sequence
  synthetic sequence
  misc_feature (20)..(20): any amino acid other than valine
PAGLLDLRQGMFAQLVAQNXLLIDGPLSWYSDPGLAGVSLTGGLSYKEDTKELVVAKAGVYYVFFQLELRRVVAGEGSGSVSLALHLQPLRSAAGAAALALTVDLPPASSEARNSAFGFQGRLLHLSAGQRLGVHLHTEARARHAWQLTQGATVLGLFRVTPEIPAGLPSPRSE

SEQ ID NO: 107 - protein, 174 aa, Artificial sequence
  synthetic sequence
  misc_feature (21)..(21): any amino acid other than leucine
PAGLLDLRQGMFAQLVAQNVXLIDGPLSWYSDPGLAGVSLTGGLSYKEDTKELVVAKAGVYYVFFQLELRRVVAGEGSGSVSLALHLQPLRSAAGAAALALTVDLPPASSEARNSAFGFQGRLLHLSAGQRLGVHLHTEARARHAWQLTQGATVLGLFRVTPEIPAGLPSPRSE

SEQ ID NO: 108 - protein, 174 aa, Artificial sequence
  synthetic sequence
  misc_feature (22)..(22): any amino acid other than leucine
PAGLLDLRQGMFAQLVAQNVLXIDGPLSWYSDPGLAGVSLTGGLSYKEDTKELVVAKAGVYYVFFQLELRRVVAGEGSGSVSLALHLQPLRSAAGAAALALTVDLPPASSEARNSAFGFQGRLLHLSAGQRLGVHLHTEARARHAWQLTQGATVLGLFRVTPEIPAGLPSPRSE

SEQ ID NO: 109 - protein, 174 aa, Artificial sequence
  synthetic sequence
  misc_feature (23)..(23): any amino acid other than isoleucine
PAGLLDLRQGMFAQLVAQNVLLXDGPLSWYSDPGLAGVSLTGGLSYKEDTKELVVAKAGVYYVFFQLELRRVVAGEGSGSVSLALHLQPLRSAAGAAALALTVDLPPASSEARNSAFGFQGRLLHLSAGQRLGVHLHTEARARHAWQLTQGATVLGLFRVTPEIPAGLPSPRSE

SEQ ID NO: 110 - protein, 174 aa, Artificial sequence
  synthetic sequence
  misc_feature (24)..(24): any amino acid other than aspartic acid
PAGLLDLRQGMFAQLVAQNVLLIXGPLSWYSDPGLAGVSLTGGLSYKEDTKELVVAKAGVYYVFFQLELRRVVAGEGSGSVSLALHLQPLRSAAGAAALALTVDLPPASSEARNSAFGFQGRLLHLSAGQRLGVHLHTEARARHAWQLTQGATVLGLFRVTPEIPAGLPSPRSE

SEQ ID NO: 111 - protein, 174 aa, Artificial sequence
  synthetic sequence
  misc_feature (25)..(25): any amino acid other than glycine
PAGLLDLRQGMFAQLVAQNVLLIDXPLSWYSDPGLAGVSLTGGLSYKEDTKELVVAKAGVYYVFFQLELRRVVAGEGSGSVSLALHLQPLRSAAGAAALALTVDLPPASSEARNSAFGFQGRLLHLSAGQRLGVHLHTEARARHAWQLTQGATVLGLFRVTPEIPAGLPSPRSE

SEQ ID NO: 112 - protein, 174 aa, Artificial sequence
  synthetic sequence
  misc_feature (26)..(26): any amino acid other than proline
PAGLLDLRQGMFAQLVAQNVLLIGGXLSWYSDPGLAGVSLTGGLSYKEDTKELVVAKAGVYYVFFQLELRRVVAGEGSGSVSLALHLQPLRSAAGAAALALTVDLPPASSEARNSAFGFQGRLLHLSAGQRLGVHLHTEARARHAWQLTQGATVLGLFRVTPEIPAGLPSPRSE

SEQ ID NO: 113 - protein, 174 aa, Artificial sequence
  synthetic sequence
  misc_feature (27)..(27): any amino acid other than leucine
PAGLLDLRQGMFAQLVAQNVLLIGGPXSWYSDPGLAGVSLTGGLSYKEDTKELVVAKAGVYYVFFQLELRRVVAGEGSGSVSLALHLQPLRSAAGAAALALTVDLPPASSEARNSAFGFQGRLLHLSAGQRLGVHLHTEARARHAWQLTQGATVLGLFRVTPEIPAGLPSPRSE

SEQ ID NO: 114 - protein, 174 aa, Artificial sequence
  synthetic sequence
  misc_feature (28)..(28): any amino acid other than serine
PAGLLDLRQGMFAQLVAQNVLLIGGPLXWYSDPGLAGVSLTGGLSYKEDTKELVVAKAGVYYVFFQLELRRVVAGEGSGSVSLALHLQPLRSAAGAAALALTVDLPPASSEARNSAFGFQGRLLHLSAGQRLGVHLHTEARARHAWQLTQGATVLGLFRVTPEIPAGLPSPRSE

SEQ ID NO: 115 - protein, 174 aa, Artificial sequence
  synthetic sequence
  misc_feature (29)..(29): any amino acid other than tryptophan
PAGLLDLRQGMFAQLVAQNVLLIGGPLSXYSDPGLAGVSLTGGLSYKEDTKELVVAKAGVYYVFFQLELRRVVAGEGSGSVSLALHLQPLRSAAGAAALALTVDLPPASSEARNSAFGFQGRLLHLSAGQRLGVHLHTEARARHAWQLTQGATVLGLFRVTPEIPAGLPSPRSE

SEQ ID NO: 116 - protein, 174 aa, Artificial sequence
  synthetic sequence
  misc_feature (30)..(30): any amino acid other than tyrosine
PAGLLDLRQGMFAQLVAQNVLLIGGPLSWXSDPGLAGVSLTGGLSYKEDTKELVVAKAGVYYVFFQLELRRVVAGEGSGSVSLALHLQPLRSAAGAAALALTVDLPPASSEARNSAFGFQGRLLHLSAGQRLGVHLHTEARARHAWQLTQGATVLGLFRVTPEIPAGLPSPRSE

SEQ ID NO: 117 - protein, 174 aa, Artificial sequence
  synthetic sequence
  misc_feature (31)..(31): any amino acid other than serine
PAGLLDLRQGMFAQLVAQNVLLIGGPLSWYXDPGLAGVSLTGGLSYKEDTKELVVAKAGVYYVFFQLELRRVVAGEGSGSVSLALHLQPLRSAAGAAALALTVDLPPASSEARNSAFGFQGRLLHLSAGQRLGVHLHTEARARHAWQLTQGATVLGLFRVTPEIPAGLPSPRSE

SEQ ID NO: 118 - protein, 174 aa, Artificial sequence
  synthetic sequence
  misc_feature (32)..(32): any amino acid other than aspartic acid
PAGLLDLRQGMFAQLVAQNVLLIGGPLSWYSXPGLAGVSLTGGLSYKEDTKELVVAKAGVYYVFFQLELRRVVAGEGSGSVSLALHLQPLRSAAGAAALALTVDLPPASSEARNSAFGFQGRLLHLSAGQRLGVHLHTEARARHAWQLTQGATVLGLFRVTPEIPAGLPSPRSE

SEQ ID NO: 119 - protein, 174 aa, Artificial sequence
  synthetic sequence
  misc_feature (33)..(33): any amino acid other than proline
PAGLLDLRQGMFAQLVAQNVLLIGGPLSWYSDXGLAGVSLTGGLSYKEDTKELVVAKAGVYYVFFQLELRRVVAGEGSGSVSLALHLQPLRSAAGAAALALTVDLPPASSEARNSAFGFQGRLLHLSAGQRLGVHLHTEARARHAWQLTQGATVLGLFRVTPEIPAGLPSPRSE

SEQ ID NO: 120 - protein, 174 aa, Artificial sequence
  synthetic sequence
  misc_feature (34)..(34): any amino acid other than glycine
PAGLLDLRQGMFAQLVAQNVLLIGGPLSWYSDPXLAGVSLTGGLSYKEDTKELVVAKAGVYYVFFQLELRRVVAGEGSGSVSLALHLQPLRSAAGAAALALTVDLPPASSEARNSAFGFQGRLLHLSAGQRLGVHLHTEARARHAWQLTQGATVLGLFRVTPEIPAGLPSPRSE

SEQ ID NO: 121 - protein, 174 aa, Artificial sequence
  synthetic sequence
  misc_feature (35)..(35): any amino acid other than leucine
PAGLLDLRQGMFAQLVAQNVLLIGGPLSWYSDPGXAGVSLTGGLSYKEDTKELVVAKAGVYYVFFQLELRRVVAGEGSGSVSLALHLQPLRSAAGAAALALTVDLPPASSEARNSAFGFQGRLLHLSAGQRLGVHLHTEARARHAWQLTQGATVLGLFRVTPEIPAGLPSPRSE

SEQ ID NO: 122 - protein, 174 aa, Artificial sequence
  synthetic sequence
  misc_feature (37)..(37): any amino acid other than glycine
PAGLLDLRQGMFAQLVAQNVLLIGGPLSWYSDPGLAXVSLTGGLSYKEDTKELVVAKAGVYYVFFQLELRRVVAGEGSGSVSLALHLQPLRSAAGAAALALTVDLPPASSEARNSAFGFQGRLLHLSAGQRLGVHLHTEARARHAWQLTQGATVLGLFRVTPEIPAGLPSPRSE

SEQ ID NO: 123 - protein, 174 aa, Artificial sequence
  synthetic sequence
  misc_feature (38)..(38): any amino acid other than valine
PAGLLDLRQGMFAQLVAQNVLLIGGPLSWYSDPGLAGXSLTGGLSYKEDTKELVVAKAGVYYVFFQLELRRVVAGEGSGSVSLALHLQPLRSAAGAAALALTVDLPPASSEARNSAFGFQGRLLHLSAGQRLGVHLHTEARARHAWQLTQGATVLGLFRVTPEIPAGLPSPRSE

SEQ ID NO: 124 - protein, 174 aa, Artificial sequence
  synthetic sequence
  misc_feature (39)..(39): any amino acid other than serine
PAGLLDLRQGMFAQLVAQNVLLIGGPLSWYSDPGLAGVXLTGGLSYKEDTKELVVAKAGVYYVFFQLELRRVVAGEGSGSVSLALHLQPLRSAAGAAALALTVDLPPASSEARNSAFGFQGRLLHLSAGQRLGVHLHTEARARHAWQLTQGATVLGLFRVTPEIPAGLPSPRSE

SEQ ID NO: 125 - protein, 174 aa, Artificial sequence
  synthetic sequence
  misc_feature (40)..(40): any amino acid other than leucine
PAGLLDLRQGMFAQLVAQNVLLIGGPLSWYSDPGLAGVSXTGGLSYKEDTKELVVAKAGVYYVFFQLELRRVVAGEGSGSVSLALHLQPLRSAAGAAALALTVDLPPASSEARNSAFGFQGRLLHLSAGQRLGVHLHTEARARHAWQLTQGATVLGLFRVTPEIPAGLPSPRSE

SEQ ID NO: 126 - protein, 174 aa, Artificial sequence
  synthetic sequence
  misc_feature (41)..(41): any amino acid other than threonine
PAGLLDLRQGMFAQLVAQNVLLIGGPLSWYSDPGLAGVSLXGGLSYKEDTKELVVAKAGVYYVFFQLELRRVVAGEGSGSVSLALHLQPLRSAAGAAALALTVDLPPASSEARNSAFGFQGRLLHLSAGQRLGVHLHTEARARHAWQLTQGATVLGLFRVTPEIPAGLPSPRSE

SEQ ID NO: 127 - protein, 174 aa, Artificial sequence
  synthetic sequence
  misc_feature (42)..(42): any amino acid other than glycine
PAGLLDLRQGMFAQLVAQNVLLIGGPLSWYSDPGLAGVSLTXGLSYKEDTKELVVAKAGVYYVFFQLELRRVVAGEGSGSVSLALHLQPLRSAAGAAALALTVDLPPASSEARNSAFGFQGRLLHLSAGQRLGVHLHTEARARHAWQLTQGATVLGLFRVTPEIPAGLPSPRSE

SEQ ID NO: 128 - protein, 174 aa, Artificial sequence
  synthetic sequence
  misc_feature (43)..(43): any amino acid other than glycine
PAGLLDLRQGMFAQLVAQNVLLIGGPLSWYSDPGLAGVSLTGXLSYKEDTKELVVAKAGVYYVFFQLELRRVVAGEGSGSVSLALHLQPLRSAAGAAALALTVDLPPASSEARNSAFGFQGRLLHLSAGQRLGVHLHTEARARHAWQLTQGATVLGLFRVTPEIPAGLPSPRSE

SEQ ID NO: 129 - protein, 174 aa, Artificial sequence
  synthetic sequence
  misc_feature (44)..(44): any amino acid other than leucine
PAGLLDLRQGMFAQLVAQNVLLIGGPLSWYSDPGLAGVSLTGGXSYKEDTKELVVAKAGVYYVFFQLELRRVVAGEGSGSVSLALHLQPLRSAAGAAALALTVDLPPASSEARNSAFGFQGRLLHLSAGQRLGVHLHTEARARHAWQLTQGATVLGLFRVTPEIPAGLPSPRSE

SEQ ID NO: 130 - protein, 174 aa, Artificial sequence
  synthetic sequence
  misc_feature (45)..(45): any amino acid other than serine
PAGLLDLRQGMFAQLVAQNVLLIGGPLSWYSDPGLAGVSLTGGLXYKEDTKELVVAKAGVYYVFFQLELRRVVAGEGSGSVSLALHLQPLRSAAGAAALALTVDLPPASSEARNSAFGFQGRLLHLSAGQRLGVHLHTEARARHAWQLTQGATVLGLFRVTPEIPAGLPSPRSE

SEQ ID NO: 131 - protein, 174 aa, Artificial sequence
  synthetic sequence
  misc_feature (46)..(46): any amino acid other than tyrosine
PAGLLDLRQGMFAQLVAQNVLLIGGPLSWYSDPGLAGVSLTGGLSXKEDTKELVVAKAGVYYVFFQLELRRVVAGEGSGSVSLALHLQPLRSAAGAAALALTVDLPPASSEARNSAFGFQGRLLHLSAGQRLGVHLHTEARARHAWQLTQGATVLGLFRVTPEIPAGLPSPRSE

SEQ ID NO: 132 - protein, 174 aa, Artificial sequence
  synthetic sequence
  misc_feature (48)..(48): any amino acid other than glutamic acid
PAGLLDLRQGMFAQLVAQNVLLIGGPLSWYSDPGLAGVSLTGGLSYKXDTKELVVAKAGVYYVFFQLELRRVVAGEGSGSVSLALHLQPLRSAAGAAALALTVDLPPASSEARNSAFGFQGRLLHLSAGQRLGVHLHTEARARHAWQLTQGATVLGLFRVTPEIPAGLPSPRSE

SEQ ID NO: 133 - protein, 174 aa, Artificial sequence
  synthetic sequence
  misc_feature (49)..(49): any amino acid other than aspartic acid
PAGLLDLRQGMFAQLVAQNVLLIGGPLSWYSDPGLAGVSLTGGLSYKEXTKELVVAKAGVYYVFFQLELRRVVAGEGSGSVSLALHLQPLRSAAGAAALALTVDLPPASSEARNSAFGFQGRLLHLSAGQRLGVHLHTEARARHAWQLTQGATVLGLFRVTPEIPAGLPSPRSE

SEQ ID NO: 134 - protein, 174 aa, Artificial sequence
  synthetic sequence
  misc_feature (50)..(50): any amino acid other than threonine
PAGLLDLRQGMFAQLVAQNVLLIGGPLSWYSDPGLAGVSLTGGLSYKEDXKELVVAKAGVYYVFFQLELRRVVAGEGSGSVSLALHLQPLRSAAGAAALALTVDLPPASSEARNSAFGFQGRLLHLSAGQRLGVHLHTEARARHAWQLTQGATVLGLFRVTPEIPAGLPSPRSE

SEQ ID NO: 135 - protein, 174 aa, Artificial sequence
  synthetic sequence
  misc_feature (51)..(51): any amino acid other than lysine
PAGLLDLRQGMFAQLVAQNVLLIGGPLSWYSDPGLAGVSLTGGLSYKEDTXELVVAKAGVYYVFFQLELRRVVAGEGSGSVSLALHLQPLRSAAGAAALALTVDLPPASSEARNSAFGFQGRLLHLSAGQRLGVHLHTEARARHAWQLTQGATVLGLFRVTPEIPAGLPSPRSE

SEQ ID NO: 136 - protein, 174 aa, Artificial sequence
  synthetic sequence
  misc_feature (52)..(52): any amino acid other than glutamic acid
PAGLLDLRQGMFAQLVAQNVLLIGGPLSWYSDPGLAGVSLTGGLSYKEDTKXLVVAKAGVYYVFFQLELRRVVAGEGSGSVSLALHLQPLRSAAGAAALALTVDLPPASSEARNSAFGFQGRLLHLSAGQRLGVHLHTEARARHAWQLTQGATVLGLFRVTPEIPAGLPSPRSE

SEQ ID NO: 137 - protein, 174 aa, Artificial sequence
  synthetic sequence
  misc_feature (64)..(64): any amino acid other than phenylalanine
PAGLLDLRQGMFAQLVAQNVLLIGGPLSWYSDPGLAGVSLTGGLSYKEDTKELVVAKAGVYYVXFQLELRRVVAGEGSGSVSLALHLQPLRSAAGAAALALTVDLPPASSEARNSAFGFQGRLLHLSAGQRLGVHLHTEARARHAWQLTQGATVLGLFRVTPEIPAGLPSPRSE

SEQ ID NO: 138 - protein, 174 aa, Artificial sequence
  synthetic sequence
  misc_feature (65)..(65): any amino acid other than phenylalanine
PAGLLDLRQGMFAQLVAQNVLLIGGPLSWYSDPGLAGVSLTGGLSYKEDTKELVVAKAGVYYVFXQLELRRVVAGEGSGSVSLALHLQPLRSAAGAAALALTVDLPPASSEARNSAFGFQGRLLHLSAGQRLGVHLHTEARARHAWQLTQGATVLGLFRVTPEIPAGLPSPRSE

SEQ ID NO: 139 - protein, 174 aa, Artificial sequence
  synthetic sequence
  misc_feature (66)..(66): any amino acid other than glutamine
PAGLLDLRQGMFAQLVAQNVLLIGGPLSWYSDPGLAGVSLTGGLSYKEDTKELVVAKAGVYYVFFXLELRRVVAGEGSGSVSLALHLQPLRSAAGAAALALTVDLPPASSEARNSAFGFQGRLLHLSAGQRLGVHLHTEARARHAWQLTQGATVLGLFRVTPEIPAGLPSPRSE

SEQ ID NO: 140 - protein, 174 aa, Artificial sequence
  synthetic sequence
  misc_feature (67)..(67): any amino acid other than leucine
PAGLLDLRQGMFAQLVAQNVLLIGGPLSWYSDPGLAGVSLTGGLSYKEDTKELVVAKAGVYYVFFQXELRRVVAGEGSGSVSLALHLQPLRSAAGAAALALTVDLPPASSEARNSAFGFQGRLLHLSAGQRLGVHLHTEARARHAWQLTQGATVLGLFRVTPEIPAGLPSPRSE

SEQ ID NO: 141 - protein, 174 aa, Artificial sequence
  synthetic sequence
  misc_feature (68)..(68): any amino acid other than glutamic acid
PAGLLDLRQGMFAQLVAQNVLLIGGPLSWYSDPGLAGVSLTGGLSYKEDTKELVVAKAGVYYVFFQLXLRRVVAGEGSGSVSLALHLQPLRSAAGAAALALTVDLPPASSEARNSAFGFQGRLLHLSAGQRLGVHLHTEARARHAWQLTQGATVLGLFRVTPEIPAGLPSPRSE

SEQ ID NO: 142 - protein, 174 aa, Artificial sequence
  synthetic sequence
  misc_feature (69)..(69): any amino acid other than leucine
PAGLLDLRQGMFAQLVAQNVLLIGGPLSWYSDPGLAGVSLTGGLSYKEDTKELVVAKAGVYYVFFQLEXRRVVAGEGSGSVSLALHLQPLRSAAGAAALALTVDLPPASSEARNSAFGFQGRLLHLSAGQRLGVHLHTEARARHAWQLTQGATVLGLFRVTPEIPAGLPSPRSE

SEQ ID NO: 143 - protein, 174 aa, Artificial sequence
  synthetic sequence
  misc_feature (70)..(70): any amino acid other than arginine
PAGLLDLRQGMFAQLVAQNVLLIGGPLSWYSDPGLAGVSLTGGLSYKEDTKELVVAKAGVYYVFFQLELXRVVAGEGSGSVSLALHLQPLRSAAGAAALALTVDLPPASSEARNSAFGFQGRLLHLSAGQRLGVHLHTEARARHAWQLTQGATVLGLFRVTPEIPAGLPSPRSE

SEQ ID NO: 144 - protein, 174 aa, Artificial sequence
  synthetic sequence
  misc_feature (71)..(71): any amino acid other than arginine
PAGLLDLRQGMFAQLVAQNVLLIGGPLSWYSDPGLAGVSLTGGLSYKEDTKELVVAKAGVYYVFFQLELRXVVAGEGSGSVSLALHLQPLRSAAGAAALALTVDLPPASSEARNSAFGFQGRLLHLSAGQRLGVHLHTEARARHAWQLTQGATVLGLFRVTPEIPAGLPSPRSE

SEQ ID NO: 145 - protein, 174 aa, Artificial sequence
  synthetic sequence
  misc_feature (72)..(72): any amino acid other than valine
PAGLLDLRQGMFAQLVAQNVLLIGGPLSWYSDPGLAGVSLTGGLSYKEDTKELVVAKAGVYYVFFQLELRRXVAGEGSGSVSLALHLQPLRSAAGAAALALTVDLPPASSEARNSAFGFQGRLLHLSAGQRLGVHLHTEARARHAWQLTQGATVLGLFRVTPEIPAGLPSPRSE

SEQ ID NO: 146 - protein, 174 aa, Artificial sequence
  synthetic sequence
  misc_feature (73)..(73): any amino acid other than valine
PAGLLDLRQGMFAQLVAQNVLLIGGPLSWYSDPGLAGVSLTGGLSYKEDTKELVVAKAGVYYVFFQLELRRVXAGEGSGSVSLALHLQPLRSAAGAAALALTVDLPPASSEARNSAFGFQGRLLHLSAGQRLGVHLHTEARARHAWQLTQGATVLGLFRVTPEIPAGLPSPRSE

SEQ ID NO: 147 - protein, 174 aa, Artificial sequence
  synthetic sequence
  misc_feature (75)..(75): any amino acid other than glycine
PAGLLDLRQGMFAQLVAQNVLLIGGPLSWYSDPGLAGVSLTGGLSYKEDTKELVVAKAGVYYVFFQLELRRVVAXEGSGSVSLALHLQPLRSAAGAAALALTVDLPPASSEARNSAFGFQGRLLHLSAGQRLGVHLHTEARARHAWQLTQGATVLGLFRVTPEIPAGLPSPRSE

SEQ ID NO: 148 - protein, 174 aa, Artificial sequence
  synthetic sequence
  misc_feature (76)..(76): any amino acid other than glutamic acid
PAGLLDLRQGMFAQLVAQNVLLIGGPLSWYSDPGLAGVSLTGGLSYKEDTKELVVAKAGVYYVFFQLELRRVVAGXGSGSVSLALHLQPLRSAAGAAALALTVDLPPASSEARNSAFGFQGRLLHLSAGQRLGVHLHTEARARHAWQLTQGATVLGLFRVTPEIPAGLPSPRSE

SEQ ID NO: 149 - protein, 174 aa, Artificial sequence
  synthetic sequence
  misc_feature (77)..(77): any amino acid other than glycine
PAGLLDLRQGMFAQLVAQNVLLIGGPLSWYSDPGLAGVSLTGGLSYKEDTKELVVAKAGVYYVFFQLELRRVVAGEXSGSVSLALHLQPLRSAAGAAALALTVDLPPASSEARNSAFGFQGRLLHLSAGQRLGVHLHTEARARHAWQLTQGATVLGLFRVTPEIPAGLPSPRSE

SEQ ID NO: 150 - protein, 174 aa, Artificial sequence
  synthetic sequence
  misc_feature (78)..(78): any amino acid other than serine
PAGLLDLRQGMFAQLVAQNVLLIGGPLSWYSDPGLAGVSLTGGLSYKEDTKELVVAKAGVYYVFFQLELRRVVAGEGXGSVSLALHLQPLRSAAGAAALALTVDLPPASSEARNSAFGFQGRLLHLSAGQRLGVHLHTEARARHAWQLTQGATVLGLFRVTPEIPAGLPSPRSE

SEQ ID NO: 151 - protein, 174 aa, Artificial sequence
  synthetic sequence
  misc_feature (104)..(104): any amino acid other than aspartic acid
PAGLLDLRQGMFAQLVAQNVLLIGGPLSWYSDPGLAGVSLTGGLSYKEDTKELVVAKAGVYYVFFQLELRRVVAGEGSGSVSLALHLQPLRSAAGAAALALTVXLPPASSEARNSAFGFQGRLLHLSAGQRLGVHLHTEARARHAWQLTQGATVLGLFRVTPEIPAGLPSPRSE

SEQ ID NO: 152 - protein, 174 aa, Artificial sequence
  synthetic sequence
  misc_feature (105)..(105): any amino acid other than leucine
PAGLLDLRQGMFAQLVAQNVLLIGGPLSWYSDPGLAGVSLTGGLSYKEDTKELVVAKAGVYYVFFQLELRRVVAGEGSGSVSLALHLQPLRSAAGAAALALTVDXPPASSEARNSAFGFQGRLLHLSAGQRLGVHLHTEARARHAWQLTQGATVLGLFRVTPEIPAGLPSPRSE

SEQ ID NO: 153 - protein, 174 aa, Artificial sequence
  synthetic sequence
  misc_feature (106)..(106): any amino acid other than proline
PAGLLDLRQGMFAQLVAQNVLLIGGPLSWYSDPGLAGVSLTGGLSYKEDTKELVVAKAGVYYVFFQLELRRVVAGEGSGSVSLALHLQPLRSAAGAAALALTVDLXPASSEARNSAFGFQGRLLHLSAGQRLGVHLHTEARARHAWQLTQGATVLGLFRVTPEIPAGLPSPRSE

SEQ ID NO: 154 - protein, 174 aa, Artificial sequence
  synthetic sequence
  misc_feature (109)..(109): any amino acid other than serine
PAGLLDLRQGMFAQLVAQNVLLIGGPLSWYSDPGLAGVSLTGGLSYKEDTKELVVAKAGVYYVFFQLELRRVVAGEGSGSVSLALHLQPLRSAAGAAALALTVDLPPAXSEARNSAFGFQGRLLHLSAGQRLGVHLHTEARARHAWQLTQGATVLGLFRVTPEIPAGLPSPRSE

SEQ ID NO: 155 - protein, 174 aa, Artificial sequence
  synthetic sequence
  misc_feature (110)..(110): any amino acid other than serine
PAGLLDLRQGMFAQLVAQNVLLIGGPLSWYSDPGLAGVSLTGGLSYKEDTKELVVAKAGVYYVFFQLELRRVVAGEGSGSVSLALHLQPLRSAAGAAALALTVDLPPASXEARNSAFGFQGRLLHLSAGQRLGVHLHTEARARHAWQLTQGATVLGLFRVTPEIPAGLPSPRSE

SEQ ID NO: 156 - protein, 174 aa, Artificial sequence
  synthetic sequence
  misc_feature (111)..(111): any amino acid other than glutamic acid
PAGLLDLRQGMFAQLVAQNVLLIGGPLSWYSDPGLAGVSLTGGLSYKEDTKELVVAKAGVYYVFFQLELRRVVAGEGSGSVSLALHLQPLRSAAGAAALALTVDLPPASSXARNSAFGFQGRLLHLSAGQRLGVHLHTEARARHAWQLTQGATVLGLFRVTPEIPAGLPSPRSE

SEQ ID NO: 157 - protein, 174 aa, Artificial sequence
  synthetic sequence
  misc_feature (113)..(113): any amino acid other than arginine
PAGLLDLRQGMFAQLVAQNVLLIGGPLSWYSDPGLAGVSLTGGLSYKEDTKELVVAKAGVYYVFFQLELRRVVAGEGSGSVSLALHLQPLRSAAGAAALALTVDLPPASSEAXNSAFGFQGRLLHLSAGQRLGVHLHTEARARHAWQLTQGATVLGLFRVTPEIPAGLPSPRSE

SEQ ID NO: 158 - protein, 174 aa, Artificial sequence
  synthetic sequence
  misc_feature (114)..(114): any amino acid other than asparagine
PAGLLDLRQGMFAQLVAQNVLLIGGPLSWYSDPGLAGVSLTGGLSYKEDTKELVVAKAGVYYVFFQLELRRVVAGEGSGSVSLALHLQPLRSAAGAAALALTVDLPPASSEARXSAFGFQGRLLHLSAGQRLGVHLHTEARARHAWQLTQGATVLGLFRVTPEIPAGLPSPRSE

SEQ ID NO: 159 - protein, 174 aa, Artificial sequence
  synthetic sequence
  misc_feature (115)..(115): any amino acid other than serine
PAGLLDLRQGMFAQLVAQNVLLIGGPLSWYSDPGLAGVSLTGGLSYKEDTKELVVAKAGVYYVFFQLELRRVVAGEGSGSVSLALHLQPLRSAAGAAALALTVDLPPASSEARNXAFGFQGRLLHLSAGQRLGVHLHTEARARHAWQLTQGATVLGLFRVTPEIPAGLPSPRSE

SEQ ID NO: 160 - protein, 174 aa, Artificial sequence
  synthetic sequence
  misc_feature (117)..(117): any amino acid other than phenylalanine
PAGLLDLRQGMFAQLVAQNVLLIGGPLSWYSDPGLAGVSLTGGLSYKEDTKELVVAKAGVYYVFFQLELRRVVAGEGSGSVSLALHLQPLRSAAGAAALALTVDLPPASSEARNSAXGFQGRLLHLSAGQRLGVHLHTEARARHAWQLTQGATVLGLFRVTPEIPAGLPSPRSE

SEQ ID NO: 161 - protein, 174 aa, Artificial sequence
  synthetic sequence
  misc_feature (130)..(130): any amino acid other than glutamine
PAGLLDLRQGMFAQLVAQNVLLIGGPLSWYSDPGLAGVSLTGGLSYKEDTKELVVAKAGVYYVFFQLELRRVVAGEGSGSVSLALHLQPLRSAAGAAALALTVDLPPASSEARNSAFGFQGRLLHLSAGXRLGVHLHTEARARHAWQLTQGATVLGLFRVTPEIPAGLPSPRSE

SEQ ID NO: 162 - protein, 174 aa, Artificial sequence
  synthetic sequence
  misc_feature (131)..(131): any amino acid other than arginine
PAGLLDLRQGMFAQLVAQNVLLIGGPLSWYSDPGLAGVSLTGGLSYKEDTKELVVAKAGVYYVFFQLELRRVVAGEGSGSVSLALHLQPLRSAAGAAALALTVDLPPASSEARNSAFGFQGRLLHLSAGQXLGVHLHTEARARHAWQLTQGATVLGLFRVTPEIPAGLPSPRSE

SEQ ID NO: 163 - protein, 174 aa, Artificial sequence
  synthetic sequence
  misc_feature (132)..(132): any amino acid other than leucine
PAGLLDLRQGMFAQLVAQNVLLIGGPLSWYSDPGLAGVSLTGGLSYKEDTKELVVAKAGVYYVFFQLELRRVVAGEGSGSVSLALHLQPLRSAAGAAALALTVDLPPASSEARNSAFGFQGRLLHLSAGQRXGVHLHTEARARHAWQLTQGATVLGLFRVTPEIPAGLPSPRSE

SEQ ID NO: 164 - protein, 174 aa, Artificial sequence
  synthetic sequence
  misc_feature (133)..(133): any amino acid other than glycine
PAGLLDLRQGMFAQLVAQNVLLIGGPLSWYSDPGLAGVSLTGGLSYKEDTKELVVAKAGVYYVFFQLELRRVVAGEGSGSVSLALHLQPLRSAAGAAALALTVDLPPASSEARNSAFGFQGRLLHLSAGQRLXVHLHTEARARHAWQLTQGATVLGLFRVTPEIPAGLPSPRSE

SEQ ID NO: 165 - protein, 174 aa, Artificial sequence
  synthetic sequence
  misc_feature (134)..(134): any amino acid other than valine
PAGLLDLRQGMFAQLVAQNVLLIGGPLSWYSDPGLAGVSLTGGLSYKEDTKELVVAKAGVYYVFFQLELRRVVAGEGSGSVSLALHLQPLRSAAGAAALALTVDLPPASSEARNSAFGFQGRLLHLSAGQRLGXHLHTEARARHAWQLTQGATVLGLFRVTPEIPAGLPSPRSE

SEQ ID NO: 166 - protein, 174 aa, Artificial sequence
  synthetic sequence
  misc_feature (135)..(135): any amino acid other than histidine
PAGLLDLRQGMFAQLVAQNVLLIGGPLSWYSDPGLAGVSLTGGLSYKEDTKELVVAKAGVYYVFFQLELRRVVAGEGSGSVSLALHLQPLRSAAGAAALALTVDLPPASSEARNSAFGFQGRLLHLSAGQRLGVXLHTEARARHAWQLTQGATVLGLFRVTPEIPAGLPSPRSE

SEQ ID NO: 167 - protein, 174 aa, Artificial sequence
  synthetic sequence
  misc_feature (136)..(136): any amino acid other than leucine
PAGLLDLRQGMFAQLVAQNVLLIGGPLSWYSDPGLAGVSLTGGLSYKEDTKELVVAKAGVYYVFFQLELRRVVAGEGSGSVSLALHLQPLRSAAGAAALALTVDLPPASSEARNSAFGFQGRLLHLSAGQRLGVHXHTEARARHAWQLTQGATVLGLFRVTPEIPAGLPSPRSE

SEQ ID NO: 168 - protein, 174 aa, Artificial sequence
  synthetic sequence
  misc_feature (137)..(137): any amino acid other than histidine
PAGLLDLRQGMFAQLVAQNVLLIGGPLSWYSDPGLAGVSLTGGLSYKEDTKELVVAKAGVYYVFFQLELRRVVAGEGSGSVSLALHLQPLRSAAGAAALALTVDLPPASSEARNSAFGFQGRLLHLSAGQRLGVHLXTEARARHAWQLTQGATVLGLFRVTPEIPAGLPSPRSE

SEQ ID NO: 169 - protein, 174 aa, Artificial sequence
  synthetic sequence
  misc_feature (138)..(138): any amino acid other than threonine
PAGLLDLRQGMFAQLVAQNVLLIGGPLSWYSDPGLAGVSLTGGLSYKEDTKELVVAKAGVYYVFFQLELRRVVAGEGSGSVSLALHLQPLRSAAGAAALALTVDLPPASSEARNSAFGFQGRLLHLSAGQRLGVHLHXEARARHAWQLTQGATVLGLFRVTPEIPAGLPSPRSE

SEQ ID NO: 170 - protein, 174 aa, Artificial sequence
  synthetic sequence
  misc_feature (139)..(139): any amino acid other than glutamic acid
PAGLLDLRQGMFAQLVAQNVLLIGGPLSWYSDPGLAGVSLTGGLSYKEDTKELVVAKAGVYYVFFQLELRRVVAGEGSGSVSLALHLQPLRSAAGAAALALTVDLPPASSEARNSAFGFQGRLLHLSAGQRLGVHLHTXARARHAWQLTQGATVLGLFRVTPEIPAGLPSPRSE

SEQ ID NO: 171 - protein, 174 aa, Artificial sequence
  synthetic sequence
  misc_feature (141)..(141): any amino acid other than arginine
PAGLLDLRQGMFAQLVAQNVLLIGGPLSWYSDPGLAGVSLTGGLSYKEDTKELVVAKAGVYYVFFQLELRRVVAGEGSGSVSLALHLQPLRSAAGAAALALTVDLPPASSEARNSAFGFQGRLLHLSAGQRLGVHLHTEAXARHAWQLTQGATVLGLFRVTPEIPAGLPSPRSE

SEQ ID NO: 172 - protein, 174 aa, Artificial sequence
  synthetic sequence
  misc_feature (143)..(143): any amino acid other than arginine
PAGLLDLRQGMFAQLVAQNVLLIGGPLSWYSDPGLAGVSLTGGLSYKEDTKELVVAKAGVYYVFFQLELRRVVAGEGSGSVSLALHLQPLRSAAGAAALALTVDLPPASSEARNSAFGFQGRLLHLSAGQRLGVHLHTEARAXHAWQLTQGATVLGLFRVTPEIPAGLPSPRSE

SEQ ID NO: 173 - protein, 174 aa, Artificial sequence
  synthetic sequence
  misc_feature (144)..(144): any amino acid other than histidine
PAGLLDLRQGMFAQLVAQNVLLIGGPLSWYSDPGLAGVSLTGGLSYKEDTKELVVAKAGVYYVFFQLELRRVVAGEGSGSVSLALHLQPLRSAAGAAALALTVDLPPASSEARNSAFGFQGRLLHLSAGQRLGVHLHTEARARXAWQLTQGATVLGLFRVTPEIPAGLPSPRSE

SEQ ID NO: 174 - protein, 174 aa, Artificial sequence
  synthetic sequence
  misc_feature (146)..(146): any amino acid other than tryptophan
PAGLLDLRQGMFAQLVAQNVLLIGGPLSWYSDPGLAGVSLTGGLSYKEDTKELVVAKAGVYYVFFQLELRRVVAGEGSGSVSLALHLQPLRSAAGAAALALTVDLPPASSEARNSAFGFQGRLLHLSAGQRLGVHLHTEARARHAXQLTQGATVLGLFRVTPEIPAGLPSPRSE

SEQ ID NO: 175 - protein, 174 aa, Artificial sequence
  synthetic sequence
  misc_feature (148)..(148): any amino acid other than leucine
PAGLLDLRQGMFAQLVAQNVLLIGGPLSWYSDPGLAGVSLTGGLSYKEDTKELVVAKAGVYYVFFQLELRRVVAGEGSGSVSLALHLQPLRSAAGAAALALTVDLPPASSEARNSAFGFQGRLLHLSAGQRLGVHLHTEARARHAWQXTQGATVLGLFRVTPEIPAGLPSPRSE

SEQ ID NO: 176 - protein, 174 aa, Artificial sequence
  synthetic sequence
  misc_feature (149)..(149): any amino acid other than threonine
PAGLLDLRQGMFAQLVAQNVLLIGGPLSWYSDPGLAGVSLTGGLSYKEDTKELVVAKAGVYYVFFQLELRRVVAGEGSGSVSLALHLQPLRSAAGAAALALTVDLPPASSEARNSAFGFQGRLLHLSAGQRLGVHLHTEARARHAWQLXQGATVLGLFRVTPEIPAGLPSPRSE

SEQ ID NO: 177 - protein, 174 aa, Artificial sequence
  synthetic sequence
  misc_feature (150)..(150): any amino acid other than glutamine
PAGLLDLRQGMFAQLVAQNVLLIGGPLSWYSDPGLAGVSLTGGLSYKEDTKELVVAKAGVYYVFFQLELRRVVAGEGSGSVSLALHLQPLRSAAGAAALALTVDLPPASSEARNSAFGFQGRLLHLSAGQRLGVHLHTEARARHAWQLTXGATVLGLFRVTPEIPAGLPSPRSE

SEQ ID NO: 178 - protein, 174 aa, Artificial sequence
  synthetic sequence
  misc_feature (151)..(151): any amino acid other than glycine
PAGLLDLRQGMFAQLVAQNVLLIGGPLSWYSDPGLAGVSLTGGLSYKEDTKELVVAKAGVYYVFFQLELRRVVAGEGSGSVSLALHLQPLRSAAGAAALALTVDLPPASSEARNSAFGFQGRLLHLSAGQRLGVHLHTEARARHAWQLTQXATVLGLFRVTPEIPAGLPSPRSE

SEQ ID NO: 179 - protein, 174 aa, Artificial sequence
  synthetic sequence
  misc_feature (153)..(153): any amino acid other than threonine
PAGLLDLRQGMFAQLVAQNVLLIGGPLSWYSDPGLAGVSLTGGLSYKEDTKELVVAKAGVYYVFFQLELRRVVAGEGSGSVSLALHLQPLRSAAGAAALALTVDLPPASSEARNSAFGFQGRLLHLSAGQRLGVHLHTEARARHAWQLTQGAXVLGLFRVTPEIPAGLPSPRSE

SEQ ID NO: 180 - protein, 174 aa, Artificial sequence
  synthetic sequence
  misc_feature (154)..(154): any amino acid other than valine
PAGLLDLRQGMFAQLVAQNVLLIGGPLSWYSDPGLAGVSLTGGLSYKEDTKELVVAKAGVYYVFFQLELRRVVAGEGSGSVSLALHLQPLRSAAGAAALALTVDLPPASSEARNSAFGFQGRLLHLSAGQRLGVHLHTEARARHAWQLTQGATXLGLFRVTPEIPAGLPSPRSE

SEQ ID NO: 181 - protein, 133 aa, Artificial sequence
  synthetic sequence
  misc_feature (42)..(42): any amino acid other than phenylalanine
APTSSSTKKTQLQLEHLLLDLQMILNGINNYKNPKLTRMLTXKFYMPKKATELKHLQCLEEELKPLEEVLNLAQSKNFHLRPRDLISNINVIVLELKGSETTFMCEYADETATIVEFLNRWITFCQSIISTLT

SEQ ID NO: 182 - protein, 133 aa, Artificial sequence
  synthetic sequence
  misc_feature (20)..(20): any amino acid other than aspartic acid
APTSSSTKKTQLQLEHLLLXLQMILNGINNYKNPKLTRMLTFKFYMPKKATELKHLQCLEEELKPLEEVLNLAQSKNFHLRPRDLISNINVIVLELKGSETTFMCEYADETATIVEFLNRWITFCQSIISTLT

SEQ ID NO: 183 - protein, 133 aa, Artificial sequence
  synthetic sequence
  misc_feature (15)..(15): any amino acid other than glutamic acid
APTSSSTKKTQLQLXHLLLDLQMILNGINNYKNPKLTRMLTFKFYMPKKATELKHLQCLEEELKPLEEVLNLAQSKNFHLRPRDLISNINVIVLELKGSETTFMCEYADETATIVEFLNRWITFCQSIISTLT

SEQ ID NO: 184 - protein, 133 aa, Artificial sequence
  synthetic sequence
  misc_feature (16)..(16): any amino acid other than histidine
APTSSSTKKTQLQLEXLLLDLQMILNGINNYKNPKLTRMLTFKFYMPKKATELKHLQCLEEELKPLEEVLNLAQSKNFHLRPRDLISNINVIVLELKGSETTFMCEYADETATIVEFLNRWITFCQSIISTLT

SEQ ID NO: 185 - protein, 133 aa, Artificial sequence; identical to SEQ ID NO: 184
  synthetic sequence
  misc_feature (16)..(16): any amino acid other than histidine

SEQ ID NO: 186 - protein, 133 aa, Artificial sequence
  synthetic sequence
  misc_feature (45)..(45): any amino acid other than tyrosine
APTSSSTKKTQLQLEHLLLDLQMILNGINNYKNPKLTRMLTFKFXMPKKATELKHLQCLEEELKPLEEVLNLAQSKNFHLRPRDLISNINVIVLELKGSETTFMCEYADETATIVEFLNRWITFCQSIISTLT

SEQ ID NO: 187 - protein, 133 aa, Artificial sequence
  synthetic sequence
  misc_feature (126)..(126): any amino acid other than glutamine
APTSSSTKKTQLQLEHLLLDLQMILNGINNYKNPKLTRMLTFKFYMPKKATELKHLQCLEEELKPLEEVLNLAQSKNFHLRPRDLISNINVIVLELKGSETTFMCEYADETATIVEFLNRWITFCXSIISTLT

SEQ ID NO: 188 - protein, 133 aa, Artificial sequence
  synthetic sequence
  misc_feature (16)..(16): any amino acid other than histidine
  misc_feature (42)..(42): any amino acid other than phenylalanine
APTSSSTKKTQLQLEXLLLDLQMILNGINNYKNPKLTRMLTXKFYMPKKATELKHLQCLEEELKPLEEVLNLAQSKNFHLRPRDLISNINVIVLELKGSETTFMCEYADETATIVEFLNRWITFCQSIISTLT

SEQ ID NO: 189 - protein, 133 aa, Artificial sequence
  synthetic sequence
  misc_feature (20)..(20): any amino acid other than aspartic acid
  misc_feature (42)..(42): any amino acid other than phenylalanine
APTSSSTKKTQLQLEHLLLXLQMILNGINNYKNPKLTRMLTXKFYMPKKATELKHLQCLEEELKPLEEVLNLAQSKNFHLRPRDLISNINVIVLELKGSETTFMCEYADETATIVEFLNRWITFCQSIISTLT

SEQ ID NO: 190 - protein, 133 aa, Artificial sequence
  synthetic sequence
  Misc_feature (15)..(15): any amino acid other than glutamic aicd
  Misc_feature (20)..(20): any amino acid other than aspartic acid
  Misc_feature (42)..(42): any amino acid other than phenylalanine
APTSSSTKKTQLQLXHLLLXLQMILNGINNYKNPKLTRMLTXKFYMPKKATELKHLQCLEEELKPLEEVLNLAQSKNFHLRPRDLISNINVIVLELKGSETTFMCEYADETATIVEFLNRWITFCQSIISTLT

SEQ ID NO: 191 - protein, 133 aa, Artificial sequence
  synthetic sequence
  Misc_feature (16)..(16): any amino acid other than histidine
  Misc_feature (20)..(20): any amino acid other than aspartic acid
  Misc_feature (42)..(42): any amino acid other than phenylalanine
APTSSSTKKTQLQLEXLLLXLQMILNGINNYKNPKLTRMLTXKFYMPKKATELKHLQCLEEELKPLEEVLNLAQSKNFHLRPRDLISNINVIVLELKGSETTFMCEYADETATIVEFLNRWITFCQSIISTLT

SEQ ID NO: 192 - protein, 133 aa, Artificial sequence
  synthetic sequence
  Misc_feature (20)..(20): any amino acid other than aspartic acid
  Misc_feature (42)..(42): any amino acid other than phenylalanine
  Misc_feature (126)..(126): any amino acid other than glutamine
APTSSSTKKTQLQLEHLLLXLQMILNGINNYKNPKLTRMLTXKFYMPKKATELKHLQCLEEELKPLEEVLNLAQSKNFHLRPRDLISNINVIVLELKGSETTFMCEYADETATIVEFLNRWITFCXSIISTLT

SEQ ID NO: 193 - protein, 133 aa, Artificial sequence
  synthetic sequence
  Misc_feature (20)..(20): any amino acid other than aspartic acid
  Misc_feature (42)..(42): any amino acid other than phenylalanine
  Misc_feature (45)..(45): any amino acid other than tyrosine
APTSSSTKKTQLQLEHLLLXLQMILNGINNYKNPKLTRMLTXKFXMPKKATELKHLQCLEEELKPLEEVLNLAQSKNFHLRPRDLISNINVIVLELKGSETTFMCEYADETATIVEFLNRWITFCQSIISTLT

SEQ ID NO: 194 - protein, 133 aa, Artificial sequence
  synthetic sequence
  Misc_feature (16)..(16): any amino acid other than histidine
  Misc_feature (20)..(20): any amino acid other than aspartic acid
  Misc_feature (42)..(42): any amino acid other than phenylalanine
  Misc_feature (45)..(45): any amino acid other than tyrosine
APTSSSTKKTQLQLEXLLLXLQMILNGINNYKNPKLTRMLTXKFXMPKKATELKHLQCLEEELKPLEEVLNLAQSKNFHLRPRDLISNINVIVLELKGSETTFMCEYADETATIVEFLNRWITFCQSIISTLT

SEQ ID NO: 195 - protein, 133 aa, Artificial sequence
  synthetic sequence
  Misc_feature (20)..(20): any amino acid other than aspartic acid
  Misc_feature (42)..(42): any amino acid other than phenylalanine
  Misc_feature (45)..(45): any amino acid other than tyrosine
  Misc_feature (126)..(126): any amino acid other than glutamine
APTSSSTKKTQLQLEHLLLXLQMILNGINNYKNPKLTRMLTXKFXMPKKATELKHLQCLEEELKPLEEVLNLAQSKNFHLRPRDLISNINVIVLELKGSETTFMCEYADETATIVEFLNRWITFCXSIISTLT

SEQ ID NO: 196 - protein, 133 aa, Artificial sequence
  synthetic sequence
  Misc_feature (16)..(16): any amino acid other than histidine
  Misc_feature (20)..(20): any amino acid other than aspartic acid
  Misc_feature (42)..(42): any amino acid other than phenylalanine
  Misc_feature (45)..(45): any amino acid other than tyrosine
  Misc_feature (126)..(126): any amino acid other than glutamine
APTSSSTKKTQLQLEXLLLXLQMILNGINNYKNPKLTRMLTXKFXMPKKATELKHLQCLEEELKPLEEVLNLAQSKNFHLRPRDLISNINVIVLELKGSETTFMCEYADETATIVEFLNRWITFCXSIISTLT

SEQ ID NO: 197 - protein, 133 aa, Artificial sequence
  synthetic sequence
  Misc_feature (16)..(16): any amino acid other than histidine
  Misc_feature (42)..(42): any amino acid other than phenylalanine
  Misc_feature (126)..(126): any amino acid other than glutamine
APTSSSTKKTQLQLEXLLLDLQMILNGINNYKNPKLTRMLTXKFYMPKKATELKHLQCLEEELKPLEEVLNLAQSKNFHLRPRDLISNINVIVLELKGSETTFMCEYADETATIVEFLNRWITFCXSIISTLT

SEQ ID NO: 198 - protein, 276 aa, Artificial sequence
  synthetic sequence
GSHSMRYFFTSVSRPGRGEPRFIAVGYVDDTQFVRFDSDAASQKMEPRAPWIEQEGPEYWDQETRNMKAHSQTDRANLGTLRGYYNQSEDGSHTIQIMYGCDVGPDGRFLRGYRQDAYDGKDYIALNEDLRSWTAADMAAQITKRKWEAVHAAEQRRVYLEGRCVDGLRRYLENGKETLQRTDPPKTHMTHHPISDHEATLRCWALGFYPAEITLTWQRDGEDQTQDTELVETRPAGDGTFQKWAAVVVPSGEEQRYTCHVQHEGLPKPLTLRWEL

SEQ ID NO: 199 - protein, 276 aa, Artificial sequence [sequence omitted]

SEQ ID NO: 200 - protein, 276 aa, Artificial sequence
  synthetic sequence
GSHSMRYFFTSVSRPGRGEPRFIAVGYVDDTQFVRFDSDAASQRMEPRAPWIEQEGPEYWDQETRNVKAQSQTDRVDLGTLRGYYNQSEAGSHTIQIMYGCDVGSDGRFLRGYRQDAYDGKDYIALNEDLRSWTAADMAAQITKRKWEAAHEAEQLRAYLDGTCVEWLRRYLENGKETLQRTDPPKTHMTHHPISDHEATLRCWALGFYPAEITLTWQRDGEDQTQDTELVETRPAGDGTFQKWAAVVVPSGEEQRYTCHVQHEGLPKPLTLRWEL

SEQ ID NO: 201 - protein, 276 aa, Artificial sequence; identical to SEQ ID NO: 49
  synthetic sequence

SEQ ID NO: 202 - protein, 276 aa, Artificial sequence
  synthetic sequence
GSHSMRYFSTSVSRPGRGEPRFIAVGYVDDTQFVRFDSDAASQRMEPRAPWIEQEGPEYWDEETGKVKAHSQTDRENLRIALRYYNQSEAGSHTLQMMFGCDVGSDGRFLRGYHQYAYDGKDYIALKEDLRSWTAADMAAQITQRKWEAARVAEQLRAYLEGTCVDGLRRYLENGKETLQRTDPPKTHMTHHPISDHEATLRCWALGFYPAEITLTWQRDGEDQTQDTELVETRPAGDGTFQKWAAVVVPSGEEQRYTCHVQHEGLPKPLTLRWEP

SEQ ID NO: 203 - protein, 276 aa, Artificial sequence; identical to SEQ ID NO: 50
  synthetic sequence

SEQ ID NO: 204 - protein, 276 aa, Artificial sequence
  synthetic sequence
GSHSMRYFSTSVSRPGRGEPRFIAVGYVDDTQFVRFDSDAASQRMEPRAPWIEQEGPEYWDEETGKVKAQSQTDRENLRIALRYYNQSEAGSHTLQMMFGCDVGSDGRFLRGYHQYAYDGKDYIALKEDLRSWTAADMAAQITKRKWEAAHVAEQQRAYLEGTCVDGLRRYLENGKETLQRTDPPKTHMTHHPISDHEATLRCWALGFYPAEITLTWQRDGEDQTQDTELVETRPAGDGTFQKWAAVVVPSGEEQRYTCHVQHEGLPKPLTLRWEP

SEQ ID NO: 205 - protein, 276 aa, Artificial sequence; identical to SEQ ID NO: 51
  synthetic sequence

SEQ ID NO: 206 - protein, 276 aa, Artificial sequence
  synthetic sequence
GSHSMRYFYTSVSRPGRGEPRFIAVGYVDDTQFVRFDSDAASQRMEPRAPWIEQEGPEYWDRNTRKVKAQSQTDRVDLGTLRGYYNQSEDGSHTIQRMYGCDVGPDGRFLRGYQQDAYDGKDYIALNEDLRSWTAADMAAQITQRKWETAHEAEQWRAYLEGTCVEWLRRYLENGKETLQRTDAPKTHMTHHAVSDHEATLRCWALSFYPAEITLTWQRDGEDQTQDTELVETRPAGDGTFQKWASVVVPSGQEQRYTCHVQHEGLPKPLTLRWEP

SEQ ID NO: 207 - protein, 276 aa, Artificial sequence [sequence omitted]

SEQ ID NO: 208 - protein, 276 aa, Artificial sequence
  synthetic sequence
GSHSMRYFDTAMSRPGRGEPRFISVGYVDDTQFVRFDSDAASPREEPRAPWIEQEGPEYWDRNTQIFKTNTQTDRESLRNLRGYYNQSEAGSHTLQSMYGCDVGPDGRLLRGHNQYAYDGKDYIALNEDLRSWTAADTAAQITQRKWEAARVAEQDRAYLEGTCVEWLRRYLENGKDTLERADPPKTHVTHHPISDHEATLRCWALGFYPAEITLTWQRDGEDQTQDTELVETRPAGDRTFQKWAAVVVPSGEEQRYTCHVQHEGLPKPLTLRWEP

SEQ ID NO: 209 - protein, 276 aa, Artificial sequence
  synthetic sequence
GSHSMRYFYTAMSRPGRGEPRFIAVGYVDDTQFVRFDSDAASPRMAPRAPWIEQEGPEYWDRNTQISKTNTQTYRESLRNLRGYYNQSEAGSHIIQRMYGCDVGPDGRLLRGYDQSAYDGKDYIALNEDLSSWTAADTAAQITQRKWEAAREAEQLRAYLEGLCVEWLRRYLENGKETLQRADPPKTHVTHHPISDHEATLRCWALGFYPAEITLTWQRDGEDQTQDTELVETRPAGDRTFQKWAAVVVPSGEEQRYTCHVQHEGLPKPLTLRWEP

SEQ ID NO: 210 - protein, 276 aa, Artificial sequence
  synthetic sequence
GSHSMRYFYTSVSRPGRGEPRFISVGYVDDTQFVRFDSDAASPREEPRAPWIEQEGPEYWDRNTQICKTNTQTYRENLRTALRYYNQSEAGSHTLQRMYGCDVGPDGRLLRGHNQFAYDGKDYIALNEDLSSWTAADTAAQITQRKWEAARVAEQLRTYLEGTCVEWLRRYLENGKETLQRADPPKTHVTHHPISDHEATLRCWALGFYPAEITLTWQRDGEDQTQDTELVETRPAGDRTFQKWAAVVVPSGEEQRYTCHVQHEGLPKPLTLRWEP

SEQ ID NO: 211 - protein, 276 aa, Artificial sequence
  synthetic sequence
GSHSMRYFHTAMSRPGRGEPRFITVGYVDDTLFVRFDSDATSPRKEPRAPWIEQEGPEYWDRETQISKTNTQTYRESLRNLRGYYNQSEAGSHTLQRMYGCDVGPDGRLLRGHNQYAYDGKDYIALNEDLRSWTAADTAAQISQRKLEAARVAEQLRAYLEGECVEWLRRYLENGKDKLERADPPKTHVTHHPISDHEATLRCWALGFYPAEITLTWQRDGEDQTQDTELVETRPAGDRTFQKWAAVVVPSGEEQRYTCHVQHEGLPKPLTLRWEP

SEQ ID NO: 212 - protein, 276 aa, Artificial sequence
  synthetic sequence
GSHSMRYFYTAMSRPGRGEPRFIAVGYVDDTQFVRFDSDAASPRMAPRAPWIEQEGPEYWDRETQKYKRQAQTDRVSLRNLRGYYNQSEAGSHTLQRMYGCDVGPDGRLLRGHDQSAYDGKDYIALNEDLSSWTAADTAAQITQRKWEAAREAEQWRAYLEGLCVEWLRRYLENGKETLQRADPPKTHVTHHPISDHEATLRCWALGFYPAEITLTWQRDGEDQTQDTELVETRPAGDRTFQKWAAVVVPSGEEQRYTCHVQHEGLPKPLTLRWEP

SEQ ID NO: 213 - protein, 276 aa, Artificial sequence
  synthetic sequence
GSHSMRYFYTAMSRPGRGEPRFIAVGYVDDTQFVRFDSDAASPRTEPRAPWIEQEGPEYWDRNTQIFKTNTQTYRENLRIALRYYNQSEAGSHIIQRMYGCDLGPDGRLLRGHDQSAYDGKDYIALNEDLSSWTAADTAAQITQRKWEAARVAEQLRAYLEGLCVEWLRRYLENGKETLQRADPPKTHVTHHPVSDHEATLRCWALGFYPAEITLTWQRDGEDQTQDTELVETRPAGDRTFQKWAAVVVPSGEEQRYTCHVQHEGLPKPLTLRWEP

SEQ ID NO: 214 - protein, 276 aa, Artificial sequence
  synthetic sequence
CSHSMKYFFTSVSRPGRGEPRFISVGYVDDTQFVRFDSDAASPRGEPRAPWVEQEGPEYWDRETQKYKRQAQTDRVSLRNLRGYYNQSEAGSHTLQWMCGCDLGPDGRLLRGYDQYAYDGKDYIALNEDLRSWTAADTAAQITQRKWEAAREAEQRRAYLEGTCVEWLRRYLENGKETLQRAEHPKTHVTHHPVSDHEATLRCWALGFYPAEITLTWQWDGEDQTQDTELVETRPAGDGTFQKWAAVMVPSGEEQRYTCHVQHEGLPEPLTLRWEP

SEQ ID NO: 215 - protein, 276 aa, Artificial sequence
  synthetic sequence
GSHSMRYFYTAVSRPGRGEPHFIAVGYVDDTQFVRFDSDAASPRGEPRAPWVEQEGPEYWDRETQKYKRQAQTDRVSLRNLRGYYNQSEARSHIIQRMYGCDVGPDGRLLRGYDQYAYDGKDYIALNEDLRSWTAADTAAQITQRKWEAAREAEQLRAYLEGLCVEWLRRYLKNGKETLQRAEHPKTHVTHHPVSDHEATLRCWALGFYPAEITLTWQWDGEDQTQDTELVETRPAGDGTFQKWAAVVVPSGEEQRYTCHVQHEGLPEPLTLRWEP

SEQ ID NO: 216 - protein, 276 aa, Artificial sequence
  synthetic sequence
GSHSMRYFYTAVSRPGRGEPHFIAVGYVDDTQFVRFDSDAASPRGEPRAPWVEQEGPEYWDRETQKYKRQAQTDRVSLRNLRGYYNQSEAGSHIIQRMYGCDVGPDGRLLRGYDQYAYDGKDYIALNEDLRSWTAADTAAQITQRKWEAAREAEQLRAYLEGLCVEWLRRYLKNGKETLQRAEHPKTHVTHHPVSDHEATLRCWALGFYPAEITLTWQWDGEDQTQDTELVETRPAGDGTFQKWAAVVVPSGEEQRYTCHVQHEGLPEPLTLRWEP

SEQ ID NO: 217 - protein, 276 aa, Artificial sequence
  synthetic sequence
GSHSMRYFSTSVSWPGRGEPRFIAVGYVDDTQFVRFDSDAASPRGEPREPWVEQEGPEYWDRETQKYKRQAQADRVNLRKLRGYYNQSEDGSHTLQRMFGCDLGPDGRLLRGYNQFAYDGKDYIALNEDLRSWTAADTAAQITQRKWEAAREAEQRRAYLEGTCVEWLRRYLENGKETLQRAEHPKTHVTHHPVSDHEATLRCWALGFYPAEITLTWQWDGEDQTQDTELVETRPAGDGTFQKWAAVVVPSGEEQRYTCHVQHEGLPEPLTLRWKP

SEQ ID NO: 218 - protein, 276 aa, Artificial sequence
  synthetic sequence
CSHSMRYFDTAVSRPGRGEPRFISVGYVDDTQFVRFDSDAASPRGEPRAPWVEQEGPEYWDRETQKYKRQAQADRVNLRKLRGYYNQSEDGSHTLQWMYGCDLGPDGRLLRGYDQSAYDGKDYIALNEDLRSWTAADTAAQITQRKWEAAREAEQWRAYLEGTCVEWLRRYLENGKETLQRAEHPKTHVTHHPVSDHEATLRCWALGFYPAEITLTWQRDGEDQTQDTELVETRPAGDGTFQKWAAVVVPSGEEQRYTCHVQHEGLPEPLTLRWEP

SEQ ID NO: 219 - protein, 276 aa, Artificial sequence
  synthetic sequence
CSHSMRYFDTAVSRPGRGEPRFISVGYVDDTQFVRFDSDAASPRGEPRAPWVEQEGPEYWDRETQNYKRQAQADRVSLRNLRGYYNQSEDGSHTLQRMYGCDLGPDGRLLRGYDQSAYDGKDYIALNEDLRSWTAADTAAQITQRKLEAARAAEQLRAYLEGTCVEWLRRYLENGKETLQRAEPPKTHVTHHPLSDHEATLRCWALGFYPAEITLTWQRDGEDQTQDTELVETRPAGDGTFQKWAAVVVPSGQEQRYTCHMQHEGLQEPLTLSWEP

SEQ ID NO: 220 - protein, 276 aa, Artificial sequence
  synthetic sequence
CSHSMRYFDTAVSRPGRGEPRFISVGYVDDTQFVRFDSDAASPRGEPRAPWVEQEGPEYWDRETQKYKRQAQADRVSLRNLRGYYNQSEDGSHTLQRMSGCDLGPDGRLLRGYDQSAYDGKDYIALNEDLRSWTAADTAAQITQRKLEAARAAEQLRAYLEGTCVEWLRRYLENGKETLQRAEPPKTHVTHHPLSDHEATLRCWALGFYPAEITLTWQRDGEDQTQDTELVETRPAGDGTFQKWAAVVVPSGQEQRYTCHMQHEGLQEPLTLSWEP

SEQ ID NO: 221 - protein, 276 aa, Artificial sequence
  synthetic sequence
CSHSMRYFYTAVSRPGRGEPRFIAVGYVDDTQFVQFDSDAASPRGEPRAPWVEQEGPEYWDRETQKYKRQAQTDRVSLRNLRGYYNQSEAGSHTLQRMYGCDLGPDGRLLRGYNQFAYDGKDYIALNEDLRSWTAADTAAQITQRKWEAARTAEQLRAYLEGTCVEWLRRYLENGKKTLQRAEHPKTHVTHHPVSDHEATLRCWALGFYPAEITLTWQRDGEDQTQDTELVETRPAGDGTFQKWAAVVVPSGEEQRYTCHVQHEGLPEPLTLRWGP

SEQ ID NO: 222 - protein, 276 aa, Artificial sequence
  synthetic sequence
CSHSMRYFYTAVSRPGRGEPHFIAVGYVDDTQFVRFDSDAASPRGEPRAPWVEQEGPEYWDRETQNYKRQAQTDRVNLRKLRGYYNQSEAGSHIIQRMYGCDLGPDGRLLRGHDQLAYDGKDYIALNEDLRSWTAADTAAQITQRKWEAAREAEQLRAYLEGTCVEWLRRYLENGKETLQRAEHPKTHVTHHPVSDHEATLRCWALGFYPAEITLTWQRDGEDQTQDTELVETRPAGDGTFQKWAAVVVPSGEEQRYTCHVQHEGLPEPLTLRWEP

SEQ ID NO: 223 - protein, 10 aa, Artificial sequence
  synthetic sequence
  misc_feature (1)..(10): Xaa can be any naturally occurring amino acid
XXXXXXXXXX

SEQ ID NO: 224 - protein, 10 aa, Artificial sequence
  synthetic sequence
  misc_feature (1)..(10): Xaa can be any naturally occurring amino acid
XXXXXXXXXX

SEQ ID NO: 225 - protein, 10 aa, Artificial sequence
  synthetic sequence
  misc_feature (1)..(10): Xaa can be any naturally occurring amino acid
XXXXXXXXXX

SEQ ID NO: 226 - protein, 10 aa, Artificial sequence
  synthetic sequence
  misc_feature (1)..(10): Xaa can be any naturally occurring amino acid
XXXXXXXXXX

SEQ ID NO: 227 - protein, 10 aa, Artificial sequence
  synthetic sequence
  misc_feature (1)..(10): Xaa can be any naturally occurring amino acid
XXXXXXXXXX

SEQ ID NO: 228 - protein, 10 aa, Artificial sequence
  synthetic sequence
  misc_feature (1)..(10): Xaa can be any naturally occurring amino acid
XXXXXXXXXX

SEQ ID NO: 229 - protein, 10 aa, Artificial sequence
  synthetic sequence
  misc_feature (1)..(10): Xaa can be any naturally occurring amino acid
XXXXXXXXXX

SEQ ID NO: 230 - protein, 10 aa, Artificial sequence
  synthetic sequence
  misc_feature (1)..(10): Xaa can be any naturally occurring amino acid
XXXXXXXXXX

SEQ ID NO: 231 - protein, 10 aa, Artificial sequence
  synthetic sequence
  misc_feature (1)..(10): Xaa can be any naturally occurring amino acid
XXXXXXXXXX

SEQ ID NO: 232 - protein, 10 aa, Artificial sequence
  synthetic sequence
  misc_feature (1)..(10): Xaa can be any naturally occurring amino acid
XXXXXXXXXX

SEQ ID NO: 233 - protein, 10 aa, Artificial sequence
  synthetic sequence
  misc_feature (1)..(10): Xaa can be any naturally occurring amino acid
XXXXXXXXXX

SEQ ID NO: 234 - protein, 10 aa, Artificial sequence
  synthetic sequence
  misc_feature (1)..(10): Xaa can be any naturally occurring amino acid
XXXXXXXXXX

SEQ ID NO: 235 - protein, 10 aa, Artificial sequence
  synthetic sequence
  misc_feature (1)..(10): Xaa can be any naturally occurring amino acid
XXXXXXXXXX

SEQ ID NO: 236 - protein, 10 aa, Artificial sequence
  synthetic sequence
  misc_feature (1)..(10): Xaa can be any naturally occurring amino acid
XXXXXXXXXX

SEQ ID NO: 237 - protein, 10 aa, Artificial sequence
  synthetic sequence
  misc_feature (1)..(10): Xaa can be any naturally occurring amino acid
XXXXXXXXXX

SEQ ID NO: 238 - protein, 10 aa, Artificial sequence
  synthetic sequence
  misc_feature (1)..(10): Xaa can be any naturally occurring amino acid
XXXXXXXXXX

SEQ ID NO: 239 - protein, 10 aa, Artificial sequence
  synthetic sequence
  misc_feature (1)..(10): Xaa can be any naturally occurring amino acid
XXXXXXXXXX

SEQ ID NO: 240 - protein, 10 aa, Artificial sequence
  synthetic sequence
  misc_feature (1)..(10): Xaa can be any naturally occurring amino acid
XXXXXXXXXX

SEQ ID NO: 241 - protein, 10 aa, Artificial sequence
  synthetic sequence
  misc_feature (1)..(10): Xaa can be any naturally occurring amino acid
XXXXXXXXXX

SEQ ID NO: 242 - protein, 10 aa, Artificial sequence
  synthetic sequence
  misc_feature (1)..(10): Xaa can be any naturally occurring amino acid
XXXXXXXXXX

SEQ ID NO: 243 - protein, 10 aa, Artificial sequence
  synthetic sequence
  misc_feature (1)..(10): Xaa can be any naturally occurring amino acid
XXXXXXXXXX

SEQ ID NO: 244 - protein, 10 aa, Artificial sequence
  synthetic sequence
  misc_feature (1)..(10): Xaa can be any naturally occurring amino acid
XXXXXXXXXX

SEQ ID NO: 245 - protein, 10 aa, Artificial sequence
  synthetic sequence
  misc_feature (1)..(10): Xaa can be any naturally occurring amino acid
XXXXXXXXXX

SEQ ID NO: 246 - protein, 10 aa, Artificial sequence
  synthetic sequence
  misc_feature (1)..(10): Xaa can be any naturally occurring amino acid
XXXXXXXXXX

SEQ ID NO: 247 - protein, 10 aa, Artificial sequence
  synthetic sequence
  misc_feature (1)..(10): Xaa can be any naturally occurring amino acid
XXXXXXXXXX

SEQ ID NO: 248 - protein, 10 aa, Artificial sequence
  synthetic sequence
  misc_feature (1)..(10): Xaa can be any naturally occurring amino acid
XXXXXXXXXX

SEQ ID NO: 249 - protein, 10 aa, Artificial sequence
  synthetic sequence
  misc_feature (1)..(10): Xaa can be any naturally occurring amino acid
XXXXXXXXXX

SEQ ID NO: 250 - protein, 10 aa, Artificial sequence
  synthetic sequence
  misc_feature (1)..(10): Xaa can be any naturally occurring amino acid
XXXXXXXXXX

SEQ ID NO: 251 - protein, 10 aa, Artificial sequence
  synthetic sequence
  misc_feature (1)..(10): Xaa can be any naturally occurring amino acid
XXXXXXXXXX

SEQ ID NO: 252 - protein, 10 aa, Artificial sequence
  synthetic sequence
  misc_feature (1)..(10): Xaa can be any naturally occurring amino acid
XXXXXXXXXX

SEQ ID NO: 253 - protein, 10 aa, Artificial sequence
  synthetic sequence
  misc_feature (1)..(10): Xaa can be any naturally occurring amino acid
XXXXXXXXXX

SEQ ID NO: 254 - protein, 10 aa, Artificial sequence
  synthetic sequence
  misc_feature (1)..(10): Xaa can be any naturally occurring amino acid
XXXXXXXXXX

SEQ ID NO: 255 - protein, 10 aa, Artificial sequence
  synthetic sequence
  misc_feature (1)..(10): Xaa can be any naturally occurring amino acid
XXXXXXXXXX

SEQ ID NO: 256 - protein, 10 aa, Artificial sequence
  synthetic sequence
  misc_feature (1)..(10): Xaa can be any naturally occurring amino acid
XXXXXXXXXX

SEQ ID NO: 257 - protein, 10 aa, Artificial sequence
  synthetic sequence
  misc_feature (1)..(10): Xaa can be any naturally occurring amino acid
XXXXXXXXXX

SEQ ID NO: 258 - protein, 10 aa, Artificial sequence
  synthetic sequence
  misc_feature (1)..(10): Xaa can be any naturally occurring amino acid
XXXXXXXXXX

SEQ ID NO: 259 - protein, 10 aa, Artificial sequence
  synthetic sequence
  misc_feature (1)..(10): Xaa can be any naturally occurring amino acid
XXXXXXXXXX

SEQ ID NO: 260 - protein, 10 aa, Artificial sequence
  synthetic sequence
  misc_feature (1)..(10): Xaa can be any naturally occurring amino acid
XXXXXXXXXX

SEQ ID NO: 261 - protein, 10 aa, Artificial sequence
  synthetic sequence
  misc_feature (1)..(10): Xaa can be any naturally occurring amino acid
XXXXXXXXXX

SEQ ID NO: 262 - protein, 10 aa, Artificial sequence
  synthetic sequence
  misc_feature (1)..(10): Xaa can be any naturally occurring amino acid
XXXXXXXXXX

SEQ ID NO: 263 - protein, 10 aa, Artificial sequence
  synthetic sequence
  misc_feature (1)..(10): Xaa can be any naturally occurring amino acid
XXXXXXXXXX

SEQ ID NO: 264 - protein, 10 aa, Artificial sequence
  synthetic sequence
  misc_feature (1)..(10): Xaa can be any naturally occurring amino acid
XXXXXXXXXX

SEQ ID NO: 265 - protein, 10 aa, Artificial sequence
  synthetic sequence
  misc_feature (1)..(10): Xaa can be any naturally occurring amino acid
XXXXXXXXXX

SEQ ID NO: 266 - protein, 10 aa, Artificial sequence
  synthetic sequence
  misc_feature (1)..(10): Xaa can be any naturally occurring amino acid
XXXXXXXXXX

SEQ ID NO: 267 - protein, 10 aa, Artificial sequence
  synthetic sequence
  misc_feature (1)..(10): Xaa can be any naturally occurring amino acid
XXXXXXXXXX

SEQ ID NO: 268 - protein, 10 aa, Artificial sequence
  synthetic sequence
  misc_feature (1)..(10): Xaa can be any naturally occurring amino acid
XXXXXXXXXX

SEQ ID NO: 269 - protein, 10 aa, Artificial sequence
  synthetic sequence
  misc_feature (1)..(10): Xaa can be any naturally occurring amino acid
XXXXXXXXXX

SEQ ID NO: 270 - protein, 10 aa, Artificial sequence
  synthetic sequence
  misc_feature (1)..(10): Xaa can be any naturally occurring amino acid
XXXXXXXXXX

SEQ ID NO: 271 - protein, 9 aa, Artificial sequence
  synthetic sequence
YPYDVPDYA

SEQ ID NO: 272 - protein, 8 aa, Artificial sequence
  synthetic sequence
DYKDDDDK

SEQ ID NO: 273 - protein, 10 aa, Artificial sequence
  synthetic sequence
EQKLISEEDL

SEQ ID NO: 274 - protein, 5 aa, Artificial sequence
  synthetic sequence
HHHHH

SEQ ID NO: 275 - protein, 6 aa, Artificial sequence
  synthetic sequence
HHHHHH

SEQ ID NO: 276 - protein, 10 aa, Artificial sequence
  synthetic sequence
EQKLISEEDL

SEQ ID NO: 277 - protein, 8 aa, Artificial sequence
  synthetic sequence
DYKDDDDK

SEQ ID NO: 278 - protein, 8 aa, Artificial sequence
  synthetic sequence
WSHPQFEK

SEQ ID NO: 279 - protein, 9 aa, Artificial sequence
  synthetic sequence
YPYDVPDYA

SEQ ID NO: 280 - protein, 5 aa, Artificial sequence
  synthetic sequence
RYIRS

SEQ ID NO: 281 - protein, 4 aa, Artificial sequence
  synthetic sequence
FHHT

SEQ ID NO: 282 - protein, 17 aa, Artificial sequence
  synthetic sequence
WEAAAREACCRECCARA

SEQ ID NO: 283 - protein, 5 aa, Artificial sequence
  synthetic sequence
AAAGG

SEQ ID NO: 284 - protein, 5 aa, Artificial sequence
  synthetic sequence
  MISC_FEATURE (1)..(4): The residues at positions 1 to 4 may be repeated 1 to 10 times
GGGGS

SEQ ID NO: 285 - protein, 8 aa, Artificial sequence
  synthetic sequence
  misc_feature (1)..(8): Xaa can be any naturally occurring amino acid
XXXXXXXX

SEQ ID NO: 286 - protein, 7 aa, Artificial sequence
  synthetic sequence
  misc_feature (1)..(7): Xaa can be any naturally occurring amino acid
XXXXXXX

SEQ ID NO: 287 - protein, 5 aa, Artificial sequence
  synthetic sequence
GTLRG

SEQ ID NO: 288 - protein, 5 aa, Artificial sequence
  synthetic sequence
YNQSE

SEQ ID NO: 289 - protein, 5 aa, Artificial sequence
  synthetic sequence
TAADM

SEQ ID NO: 290 - protein, 5 aa, Artificial sequence
  synthetic sequence
AQTTK

SEQ ID NO: 291 - protein, 5 aa, Artificial sequence
  synthetic sequence
VETRP

SEQ ID NO: 292 - protein, 5 aa, Artificial sequence
  synthetic sequence
GDGTF

SEQ ID NO: 293 - protein, 5 aa, Artificial sequence
  synthetic sequence
RNLRG

SEQ ID NO: 294 - protein, 5 aa, Artificial sequence
  synthetic sequence
TAADT

SEQ ID NO: 295 - protein, 5 aa, Artificial sequence
  synthetic sequence
AQITQ

SEQ ID NO: 296 - protein, 5 aa, Artificial sequence
  synthetic sequence
GDRTF

SEQ ID NO: 297 - protein, 276 aa, Homo sapiens [sequence omitted]

SEQ ID NO: 298 - protein, 276 aa, Artificial sequence; identical to SEQ ID NO: 48
  synthetic sequence

SEQ ID NO: 299 - protein, 276 aa, Artificial sequence
  synthetic sequence
GSHSMRYFFTSVSRPGRGEPRFIAVGYVDDTQFVRFDSDAASQRMEPRAPWIEQEGPEYWDGETRKVKAHSQTHRVDLGTLRGCYNQSEAGSHTVQRMYGCDVGSDWRFLRGYHQYAYDGKDYIALKEDLRSWTAADMCAQTTKHKWEAAHVAEQLRAYLEGTCVEWLRRYLENGKETLQRTDAPKTHMTHHAVSDHEATLRCWALSFYPAEITLTWQRDGEDQTQDTELVETRPAGDGTFQKWAAVVVPSGQEQRYTCHVQHEGLPKPLTLRWEP

SEQ ID NO: 300 - protein, 275 aa, Homo sapiens
GSHSMRYFYTSVSRPGRGEPRFIAVGYVDDTQFVRFDSDAASQRMEPRAPWIEQEGPEYWDQETRNVKAQSQTDRVDLGTLRGYYNQSEDGSHTIQIMYGCDVGPDGRFLRGYRQDAYDGKDYIALNEDLRSWTAADMAAQITKRKWEAAHAAEQQRAYLEGTCVEWLRRYLENGKETLQRTDPPKTHMTHHPISDHEATLRCWALGFYPAEITLTWQRDGEDQTQDTELVETRPAGDGTFQKWAAVVVPSGEEQRYTCHVQHEGLPKPLTLRWE

SEQ ID NO: 301 - protein, 275 aa, Artificial sequence
  synthetic sequence
GSHSMRYFYTSVSRPGRGEPRFIAVGYVDDTQFVRFDSDAASQRMEPRAPWIEQEGPEYWDQETRNVKAQSQTDRVDLGTLRGAYNQSEDGSHTIQIMYGCDVGPDGRFLRGYRQDAYDGKDYIALNEDLRSWTAADMAAQITKRKWEAAHAAEQQRAYLEGTCVEWLRRYLENGKETLQRTDPPKTHMTHHPISDHEATLRCWALGFYPAEITLTWQRDGEDQTQDTELVETRPCGDGTFQKWAAVVVPSGEEQRYTCHVQHEGLPKPLTLRWE

SEQ ID NO: 302 - protein, 341 aa, Homo sapiens
GSHSMRYFSTSVSRPGRGEPRFIAVGYVDDTQFVRFDSDAASQRMEPRAPWIEQEGPEYWDEETGKVKAHSQTDRENLRIALRYYNQSEAGSHTLQMMFGCDVGSDGRFLRGYHQYAYDGKDYIALKEDLRSWTAADMAAQITKRKWEAAHVAEQQRAYLEGTCVDGLRRYLENGKETLQRTDPPKTHMTHHPISDHEATLRCWALGFYPAEITLTWQRDGEDQTQDTELVETRPAGDGTFQKWAAVVVPSGEEQRYTCHVQHEGLPKPLTLRWEPSSQPTVPIVGIIAGLVLLGAVITGAVVAAVMWRRNSSDRKGGSYSQAASSDSAQGSDVSLTACKV

SEQ ID NO: 303 - protein, 341 aa, Homo sapiens
GSHSMRYFTTSVSRPGRGEPRFIAVGYVDDTQFVRFDSDAASQRMEPRAPWIEQEGPEYWDRNTRNVKAHSQIDRVDLGTLRGYYNQSEAGSHTIQMMYGCDVGSDGRFLRGYQQDAYDGKDYIALNEDLRSWTAADMAAQITQRKWEAARVAEQLRAYLEGTCVEWLRRYLENGKETLQRTDPPKTHMTHHAVSDHEATLRCWALSFYPAEITLTWQRDGEDQTQDTELVETRPAGDGTFQKWASVVVPSGQEQRYTCHVQHEGLPKPLTLRWEPSSQPTIPIVGIIAGLVLFGAVFAGAVVAAVRWRRKSSDRKGGSYSQAASSDSAQGSDMSLTACKV

SEQ ID NO: 304 - protein, 276 aa, Homo sapiens [sequence omitted]

SEQ ID NO: 305 - protein, 276 aa, Artificial sequence
  synthetic sequence
GSHSMRYFYTSVSRPGRGEPRFISVGYVDDTQFVRFDSDAASPREEPRAPWIEQEGPEYWDRNTQIYKAQAQTDRESLRNLRGAYNQSEAGSHTLQSMYGCDVGPDGRLLRGHDQYAYDGKDYIALNEDLRSWTAADTAAQITQRKWEAAREAEQRRAYLEGECVEWLRRYLENGKDKLERADPPKTHVTHHPISDHEATLRCWALGFYPAEITLTWQRDGEDQTQDTELVETRPCGDRTFQKWAAVVVPSGEEQRYTCHVQHEGLPKPLTLRWEP

SEQ ID NO: 306 - protein, 276 aa, Artificial sequence
  synthetic sequence
GSHSMRYFYTSVSRPGRGEPRFISVGYVDDTQFVRFDSDAASPREEPRAPWIEQEGPEYWDRNTQIYKAQAQTDRESLRNLRGCYNQSEAGSHTLQSMYGCDVGPDGRLLRGHDQYAYDGKDYIALNEDLRSWTAADTCAQITQRKWEAAREAEQRRAYLEGECVEWLRRYLENGKDKLERADPPKTHVTHHPISDHEATLRCWALGFYPAEITLTWQRDGEDQTQDTELVETRPAGDRTFQKWAAVVVPSGEEQRYTCHVQHEGLPKPLTLRWEP

SEQ ID NO: 307 - protein, 276 aa, Homo sapiens; identical to SEQ ID NO: 219

SEQ ID NO: 308 - protein, 276 aa, Homo sapiens
CSHSMRYFDTAVSRPGRGEPRFISVGYVDDTQFVRFDSDAASPRGEPRAPWVEQEGPEYWDRETQNYKRQAQADRVSLRNLRGAYNQSEDGSHTLQRMYGCDLGPDGRLLRGYDQSAYDGKDYIALNEDLRSWTAADTAAQITQRKLEAARAAEQLRAYLEGTCVEWLRRYLENGKETLQRAEPPKTHVTHHPLSDHEATLRCWALGFYPAEITLTWQRDGEDQTQDTELVETRPCGDGTFQKWAAVVVPSGQEQRYTCHMQHEGLQEPLTLSWEP

SEQ ID NO: 309 - protein, 246 aa, Artificial sequence
  synthetic sequence
  MISC_FEATURE (78)..(79): Amino acid cluster 1 is present between the residues at positions 78 and 79.
  MISC_FEATURE (79)..(79): The cysteine residue forms a disulfide bond between the alpha1 and alpha2-1 helices.
  MISC_FEATURE (79)..(80): Amino acid cluster 2 is present between the residues at positions 79 and 80.
  MISC_FEATURE (123)..(124): Amino acid cluster 3 is present between the residues at positions 123 and 124.
  MISC_FEATURE (124)..(124): The cysteine residue at position 124 forms a disulfide bond between the alpha1 and alpha2-1 helices
  MISC_FEATURE (124)..(125): Amino acid cluster 4 is present between the residues at positions 124 and 125.
  MISC_FEATURE (210)..(211): Amino acid cluster 5 is present between the residues at positions 210 and 211.
  MISC_FEATURE (211)..(211): The cysteine residue forms a disulfide bond with the beta2M polypeptide cysteine at position 12.
  MISC_FEATURE (211)..(212): Amino acid cluster 6 is present between the residues at positions 211 and 212.
  MISC_FEATURE (212)..(213): Amino acid cluster 6 is present between the residues at positions 211 and 212.
GSHSMRYFFTSVSRPGRGEPRFIAVGYVDDTQFVRFDSDAASQRMEPRAPWIEQEGPEYWDGETRKVKAHSQTHRVDLCAGSHTVQRMYGCDVGSDWRFLRGYHQYAYDGKDYIALKEDLRSWCHKWEAAHVAEQLRAYLEGTCVEWLRRYLENGKETLQRTDAPKTHMTHHAVSDHEATLRCWALSFYPAEITLTWQRDGEDQTQDTELCQKWAAVVVPSGQEQRYTCHVQHEGLPKPLTLRWEP

SEQ ID NO: 310 - protein, 99 aa, Artificial sequence [sequence omitted]

SEQ ID NO: 311 - protein, 99 aa, Artificial sequence
  synthetic sequence
IQRTPKIQVYSCHPAENGKSNFLNCYVSGFHPSDIEVDLLKNGERIEKVEHSDLSFSKDWSFYLLYYTEFTPTEKDEYACRVNHVTLSQPKIVKWDRDM

SEQ ID NO: 312 - protein, 276 aa, Artificial sequence
  synthetic sequence
GSHSMRYFFTSVSRPGRGEPRFIAVGYVDDTQFVRFDSDAASQRMEPRAPWIEQEGPEYWDGETRKVKAHSQTHRVDLGTLRGYYNQSEAGSHTVQRMYGCDVGSDWRFLRGYHQYAYDGKDYIALKEDLRSWTAADMAAQTTKHKWEAAHVAEQLRAYLEGTCVEWLRRYLENGKETLQRTDAPKTHMTHHAVSDHEATLRCWALSFYPAEITLTWQRDGEDQTQDTELVETRPCGDGTFQKWAAVVVPSGQEQRYTCHVQHEGLPKPLTLRWEP

SEQ ID NO: 313 - protein, 275 aa, Artificial sequence; identical to SEQ ID NO: 46
  synthetic sequence

SEQ ID NO: 314 - protein, 99 aa, Artificial sequence; identical to SEQ ID NO: 311
  synthetic sequence

SEQ ID NO: 315 - protein, 10 aa, Artificial sequence
  synthetic sequence
  MISC_FEATURE (6)..(10): The amino acids from positions 6 to 10 may be repeated 1, 2, 3, 4, 5, 6, 7, 8, or 9 times
GCGGSGGGGS

SEQ ID NO: 316 - protein, 20 aa, Artificial sequence
  synthetic sequence
GCGGSGGGGSGGGGSGGGGS

SEQ ID NO: 317 - protein, 15 aa, Artificial sequence
  synthetic sequence
GCGGSGGGGSGGGGS

SEQ ID NO: 318 - protein, 5 aa, Artificial sequence
  synthetic sequence
GCGGS

SEQ ID NO: 319 - protein, 10 aa, Artificial sequence
  synthetic sequence
  MISC_FEATURE (6)..(10): The amino acids at positions 6 to 10 may be repeated 1 to 10 times
GCGGSGGGGS

SEQ ID NO: 320 - protein, 15 aa, Artificial sequence
  synthetic sequence
GCGGSGGGGSGGGGS

SEQ ID NO: 321 - protein, 20 aa, Artificial sequence
  synthetic sequence
GCGGSGGGGSGGGGSGGGGS

SEQ ID NO: 322 - protein, 25 aa, Artificial sequence
  synthetic sequence
GCGGSGGGGSGGGGSGGGGSGGGGS

SEQ ID NO: 323 - protein, 30 aa, Artificial sequence
  synthetic sequence
GCGGSGGGGSGGGGSGGGGSGGGGSGGGGS

SEQ ID NO: 324 - protein, 35 aa, Artificial sequence
  synthetic sequence
GCGGSGGGGSGGGGSGGGGSGGGGSGGGGSGGGGS

SEQ ID NO: 325 - protein, 40 aa, Artificial sequence
  synthetic sequence
GCGGSGGGGSGGGGSGGGGSGGGGSGGGGSGGGGSGGGGS

SEQ ID NO: 326 - protein, 45 aa, Artificial sequence
  synthetic sequence
GCGGSGGGGSGGGGSGGGGSGGGGSGGGGSGGGGSGGGGSGGGGS

SEQ ID NO: 327 - protein, 50 aa, Artificial sequence
  synthetic sequence
GCGGSGGGGSGGGGSGGGGSGGGGSGGGGSGGGGSGGGGSGGGGSGGGGS

SEQ ID NO: 328 - protein, 55 aa, Artificial sequence
  synthetic sequence
GCGGSGGGGSGGGGSGGGGSGGGGSGGGGSGGGGSGGGGSGGGGSGGGGSGGGGS

SEQ ID NO: 329 - protein, 5 aa, Artificial sequence
  synthetic sequence
CGGGS

SEQ ID NO: 330 - protein, 10 aa, Artificial sequence
  synthetic sequence
  MISC_FEATURE (6)..(10): The amino acids at positions 6 to 10 can be repeated 1 to 10 times
CGGGSGGGGS

SEQ ID NO: 331 - protein, 10 aa, Artificial sequence
  synthetic sequence
CGGGSGGGGS

SEQ ID NO: 332 - protein, 15 aa, Artificial sequence
  synthetic sequence
CGGGSGGGGSGGGGS

SEQ ID NO: 333 - protein, 20 aa, Artificial sequence
  synthetic sequence
CGGGSGGGGSGGGGSGGGGS

SEQ ID NO: 334 - protein, 25 aa, Artificial sequence
  synthetic sequence
CGGGSGGGGSGGGGSGGGGSGGGGS

SEQ ID NO: 335 - protein, 30 aa, Artificial sequence
  synthetic sequence
CGGGSGGGGSGGGGSGGGGSGGGGSGGGGS

SEQ ID NO: 336 - protein, 35 aa, Artificial sequence
  synthetic sequence
CGGGSGGGGSGGGGSGGGGSGGGGSGGGGSGGGGS

SEQ ID NO: 337 - protein, 40 aa, Artificial sequence
  synthetic sequence
CGGGSGGGGSGGGGSGGGGSGGGGSGGGGSGGGGSGGGGS

SEQ ID NO: 338 - protein, 45 aa, Artificial sequence
  synthetic sequence
CGGGSGGGGSGGGGSGGGGSGGGGSGGGGSGGGGSGGGGSGGGGS

SEQ ID NO: 339 - protein, 50 aa, Artificial sequence
  synthetic sequence
CGGGSGGGGSGGGGSGGGGSGGGGSGGGGSGGGGSGGGGSGGGGSGGGGS

SEQ ID NO: 340 - protein, 55 aa, Artificial sequence
  synthetic sequence
CGGGSGGGGSGGGGSGGGGSGGGGSGGGGSGGGGSGGGGSGGGGSGGGGSGGGGS

SEQ ID NO: 341 - protein, 276 aa, Artificial sequence
  synthetic sequence
GSHSMRYFFTSVSRPGRGEPRFIAVGYVDDTQFVRFDSDAASQRMEPRAPWIEQEGPEYWDGETRKVKAHSQTHRVDLGTLRGCYNQSEAGSHTVQRMYGCDVGSDWRFLRGYHQYAYDGKDYIALKEDLRSWTAADMAAQTTKHKWEAAHVAEQLRAYLEGTCVEWLRRYLENGKETLQRTDAPKTHMTHHAVSDHEATLRCWALSFYPAEITLTWQRDGEDQTQDTELVETRPCGDGTFQKWAAVVVPSGQEQRYTCHVQHEGLPKPLTLRWEP

SEQ ID NO: 342 - protein, 10 aa, Artificial sequence
  synthetic sequence
  MISC_FEATURE (6)..(10): The residues from positions 6 to 10 may be repeated 1 to 10 times
GCGGSGGGGS

SEQ ID NO: 343 - protein, 275 aa, Artificial sequence
  synthetic sequence
GSHSMRYFFTSVSRPGRGEPRFIAVGYVDDTQFVRFDSDAASQKMEPRAPWIEQEGPEYWDQETRNMKAHSQTDRANLGTLRGCYNQSEDGSHTIQIMYGCDVGPDGRFLRGYRQDAYDGKDYIALNEDLRSWTAADMAAQITKRKWEAVHAAEQRRVYLEGRCVDGLRRYLENGKETLQRTDPPKTHMTHHPISDHEATLRCWALGFYPAEITLTWQRDGEDQTQDTELVETRPCGDGTFQKWAAVVVPSGEEQRYTCHVQHEGLPKPLTLRWE

SEQ ID NO: 344 - protein, 275 aa, Artificial sequence
  synthetic sequence
GSHSMRYFYTSVSRPGRGEPRFIAVGYVDDTQFVRFDSDAASQRMEPRAPWIEQEGPEYWDQETRNVKAQSQTDRVDLGTLRGCYNQSEDGSHTIQIMYGCDVGPDGRFLRGYRQDAYDGKDYIALNEDLRSWTAADMAAQITKRKWEAAHAAEQQRAYLEGRCVEWLRRYLENGKETLQRTDPPKTHMTHHPISDHEATLRCWALGFYPAEITLTWQRDGEDQTQDTELVETRPCGDGTFQKWAAVVVPSGEEQRYTCHVQHEGLPKPLTLRWE

SEQ ID NO: 345 - protein, 275 aa, Artificial sequence
  synthetic sequence
GSHSMRYFSTSVSRPGRGEPRFIAVGYVDDTQFVRFDSDAASQRMEPRAPWIEQEGPEYWDEETGKVKAHSQTDRENLRIALRCYNQSEAGSHTLQMMFGCDVGSDGRFLRGYHQYAYDGKDYIALKEDLRSWTAADMAAQITQRKWEAARVAEQLRAYLEGTCVDGLRRYLENGKETLQRTDPPKTHMTHHPISDHEATLRCWALGFYPAEITLTWQRDGEDQTQDTELVETRPCGDGTFQKWAAVVVPSGEEQRYTCHVQHEGLPKPLTLRWE

SEQ ID NO: 346 - protein, 275 aa, Artificial sequence
  synthetic sequence
GSHSMRYFSTSVSRPGRGEPRFIAVGYVDDTQFVRFDSDAASQRMEPRAPWIEQEGPEYWDEETGKVKAHSQTDRENLRIALRCYNQSEAGSHTLQMMFGCDVGSDGRFLRGYHQYAYDGKDYIALKEDLRSWTAADMAAQITKRKWEAAHVAEQQRAYLEGTCVDGLRRYLENGKETLQRTDPPKTHMTHHPISDHEATLRCWALGFYPAEITLTWQRDGEDQTQDTELVETRPCGDGTFQKWAAVVVPSGEEQRYTCHVQHEGLPKPLTLRWE

SEQ ID NO: 347 - protein, 275 aa, Artificial sequence
  synthetic sequence
GSHSMRYFSTSVSRPGRGEPRFIAVGYVDDTQFVRFDSDAASQRMEPRAPWIEQEGPEYWDEETGKVKAQSQTDRENLRIALRCYNQSEAGSHTLQMMFGCDVGSDGRFLRGYHQYAYDGKDYIALKEDLRSWTAADMAAQITKRKWEAAHVAEQQRAYLEGTCVDGLRRYLENGKETLQRTDPPKTHMTHHPISDHEATLRCWALGFYPAEITLTWQRDGEDQTQDTELVETRPCGDGTFQKWAAVVVPSGEEQRYTCHVQHEGLPKPLTLRWE

SEQ ID NO: 348 - protein, 275 aa, Artificial sequence
  synthetic sequence
GSHSMRYFTTSVSRPGRGEPRFIAVGYVDDTQFVRFDSDAASQRMEPRAPWIEQEGPEYWDRNTRNVKAHSQIDRVDLGTLRGCYNQSEAGSHTIQMMYGCDVGSDGRFLRGYQQDAYDGKDYIALNEDLRSWTAADMAAQITQRKWEAARVAEQLRAYLEGTCVEWLRRYLENGKETLQRTDPPKTHMTHHAVSDHEATLRCWALSFYPAEITLTWQRDGEDQTQDTELVETRPCGDGTFQKWASVVVPSGQEQRYTCHVQHEGLPKPLTLRWE

SEQ ID NO: 349 - protein, 275 aa, Artificial sequence
  synthetic sequence
GSHSMRYFYTSVSRPGRGEPRFIAVGYVDDTQFVRFDSDAASQRMEPRAPWIEQEGPEYWDRNTRKVKAQSQTDRVDLGTLRGCYNQSEDGSHTIQRMYGCDVGPDGRFLRGYQQDAYDGKDYIALNEDLRSWTAADMAAQITQRKWETAHEAEQWRAYLEGTCVEWLRRYLENGKETLQRTDAPKTHMTHHAVSDHEATLRCWALSFYPAEITLTWQRDGEDQTQDTELVETRPCGDGTFQKWASVVVPSGQEQRYTCHVQHEGLPKPLTLRWE

SEQ ID NO: 350 - protein, 276 aa, Artificial sequence
  synthetic sequence
GSHSMRYFYTSVSRPGRGEPRFISVGYVDDTQFVRFDSDAASPREEPRAPWIEQEGPEYWDRNTQIYKAQAQTDRESLRNLRGCYNQSEAGSHTLQSMYGCDVGPDGRLLRGHDQYAYDGKDYIALNEDLRSWTAADTAAQITQRKWEAAREAEQRRAYLEGECVEWLRRYLENGKDKLERADPPKTHVTHHPISDHEATLRCWALGFYPAEITLTWQRDGEDQTQDTELVETRPCGDRTFQKWAAVVVPSGEEQRYTCHVQHEGLPKPLTLRWEP

SEQ ID NO: 351 - protein, 275 aa, Artificial sequence
  synthetic sequence
GSHSMRYFDTAMSRPGRGEPRFISVGYVDDTQFVRFDSDAASPREEPRAPWIEQEGPEYWDRNTQIFKTNTQTDRESLRNLRGCYNQSEAGSHTLQSMYGCDVGPDGRLLRGHNQYAYDGKDYIALNEDLRSWTAADTAAQITQRKWEAARVAEQDRAYLEGTCVEWLRRYLENGKDTLERADPPKTHVTHHPISDHEATLRCWALGFYPAEITLTWQRDGEDQTQDTELVETRPCGDRTFQKWAAVVVPSGEEQRYTCHVQHEGLPKPLTLRWE

SEQ ID NO: 352 - protein, 275 aa, Artificial sequence
  synthetic sequence
GSHSMRYFYTAMSRPGRGEPRFIAVGYVDDTQFVRFDSDAASPRMAPRAPWIEQEGPEYWDRNTQISKTNTQTYRESLRNLRGCYNQSEAGSHIIQRMYGCDVGPDGRLLRGYDQSAYDGKDYIALNEDLSSWTAADTAAQITQRKWEAAREAEQLRAYLEGLCVEWLRRYLENGKETLQRADPPKTHVTHHPISDHEATLRCWALGFYPAEITLTWQRDGEDQTQDTELVETRPCGDRTFQKWAAVVVPSGEEQRYTCHVQHEGLPKPLTLRWE

SEQ ID NO: 353 - protein, 275 aa, Artificial sequence
  synthetic sequence
GSHSMRYFYTSVSRPGRGEPRFISVGYVDDTQFVRFDSDAASPREEPRAPWIEQEGPEYWDRNTQICKTNTQTYRENLRTALRCYNQSEAGSHTLQRMYGCDVGPDGRLLRGHNQFAYDGKDYIALNEDLSSWTAADTAAQITQRKWEAARVAEQLRTYLEGTCVEWLRRYLENGKETLQRADPPKTHVTHHPISDHEATLRCWALGFYPAEITLTWQRDGEDQTQDTELVETRPCGDRTFQKWAAVVVPSGEEQRYTCHVQHEGLPKPLTLRWE

SEQ ID NO: 354 - protein, 275 aa, Artificial sequence
  synthetic sequence
GSHSMRYFHTAMSRPGRGEPRFITVGYVDDTLFVRFDSDATSPRKEPRAPWIEQEGPEYWDRETQISKTNTQTYRESLRNLRGCYNQSEAGSHTLQRMYGCDVGPDGRLLRGHNQYAYDGKDYIALNEDLRSWTAADTAAQISQRKLEAARVAEQLRAYLEGECVEWLRRYLENGKDKLERADPPKTHVTHHPISDHEATLRCWALGFYPAEITLTWQRDGEDQTQDTELVETRPCGDRTFQKWAAVVVPSGEEQRYTCHVQHEGLPKPLTLRWE

SEQ ID NO: 355 - protein, 275 aa, Artificial sequence
  synthetic sequence
GSHSMRYFYTAMSRPGRGEPRFIAVGYVDDTQFVRFDSDAASPRMAPRAPWIEQEGPEYWDRETQKYKRQAQTDRVSLRNLRGCYNQSEAGSHTLQRMYGCDVGPDGRLLRGHDQSAYDGKDYIALNEDLSSWTAADTAAQITQRKWEAAREAEQWRAYLEGLCVEWLRRYLENGKETLQRADPPKTHVTHHPISDHEATLRCWALGFYPAEITLTWQRDGEDQTQDTELVETRPCGDRTFQKWAAVVVPSGEEQRYTCHVQHEGLPKPLTLRWE

SEQ ID NO: 356 - protein, 275 aa, Artificial sequence
  synthetic sequence
GSHSMRYFYTAMSRPGRGEPRFIAVGYVDDTQFVRFDSDAASPRTEPRAPWIEQEGPEYWDRNTQIFKTNTQTYRENLRIALRCYNQSEAGSHIIQRMYGCDLGPDGRLLRGHDQSAYDGKDYIALNEDLSSWTAADTAAQITQRKWEAARVAEQLRAYLEGLCVEWLRRYLENGKETLQRADPPKTHVTHHPVSDHEATLRCWALGFYPAEITLTWQRDGEDQTQDTELVETRPCGDRTFQKWAAVVVPSGEEQRYTCHVQHEGLPKPLTLRWE

SEQ ID NO: 357 - protein, 276 aa, Artificial sequence
  synthetic sequence
CSHSMRYFDTAVSRPGRGEPRFISVGYVDDTQFVRFDSDAASPRGEPRAPWVEQEGPEYWDRETQNYKRQAQADRVSLRNLRGCYNQSEDGSHTLQRMYGCDLGPDGRLLRGYDQSAYDGKDYIALNEDLRSWTAADTAAQITQRKLEAARAAEQLRAYLEGTCVEWLRRYLENGKETLQRAEPPKTHVTHHPLSDHEATLRCWALGFYPAEITLTWQRDGEDQTQDTELVETRPCGDGTFQKWAAVVVPSGQEQRYTCHMQHEGLQEPLTLSWEP

SEQ ID NO: 358 - protein, 276 aa, Artificial sequence
  synthetic sequence
CSHSMKYFFTSVSRPGRGEPRFISVGYVDDTQFVRFDSDAASPRGEPRAPWVEQEGPEYWDRETQKYKRQAQTDRVSLRNLRGCYNQSEAGSHTLQWMCGCDLGPDGRLLRGYDQYAYDGKDYIALNEDLRSWTAADTAAQITQRKWEAAREAEQRRAYLEGTCVEWLRRYLENGKETLQRAEHPKTHVTHHPVSDHEATLRCWALGFYPAEITLTWQWDGEDQTQDTELVETRPCGDGTFQKWAAVMVPSGEEQRYTCHVQHEGLPEPLTLRWEP

SEQ ID NO: 359 - protein, 276 aa, Artificial sequence
  synthetic sequence
GSHSMRYFYTAVSRPGRGEPHFIAVGYVDDTQFVRFDSDAASPRGEPRAPWVEQEGPEYWDRETQKYKRQAQTDRVSLRNLRGCYNQSEARSHIIQRMYGCDVGPDGRLLRGYDQYAYDGKDYIALNEDLRSWTAADTAAQITQRKWEAAREAEQLRAYLEGLCVEWLRRYLKNGKETLQRAEHPKTHVTHHPVSDHEATLRCWALGFYPAEITLTWQWDGEDQTQDTELVETRPCGDGTFQKWAAVVVPSGEEQRYTCHVQHEGLPEPLTLRWEP

SEQ ID NO: 360 - protein, 276 aa, Artificial sequence
  synthetic sequence
GSHSMRYFYTAVSRPGRGEPHFIAVGYVDDTQFVRFDSDAASPRGEPRAPWVEQEGPEYWDRETQKYKRQAQTDRVSLRNLRGCYNQSEAGSHIIQRMYGCDVGPDGRLLRGYDQYAYDGKDYIALNEDLRSWTAADTAAQITQRKWEAAREAEQLRAYLEGLCVEWLRRYLKNGKETLQRAEHPKTHVTHHPVSDHEATLRCWALGFYPAEITLTWQWDGEDQTQDTELVETRPCGDGTFQKWAAVVVPSGEEQRYTCHVQHEGLPEPLTLRWEP

SEQ ID NO: 361 - protein, 276 aa, Artificial sequence
  synthetic sequence
GSHSMRYFSTSVSWPGRGEPRFIAVGYVDDTQFVRFDSDAASPRGEPREPWVEQEGPEYWDRETQKYKRQAQADRVNLRKLRGCYNQSEDGSHTLQRMFGCDLGPDGRLLRGYNQFAYDGKDYIALNEDLRSWTAADTAAQITQRKWEAAREAEQRRAYLEGTCVEWLRRYLENGKETLQRAEHPKTHVTHHPVSDHEATLRCWALGFYPAEITLTWQWDGEDQTQDTELVETRPCGDGTFQKWAAVVVPSGEEQRYTCHVQHEGLPEPLTLRWKP

SEQ ID NO: 362 - protein, 276 aa, Artificial sequence
  synthetic sequence
CSHSMRYFDTAVSRPGRGEPRFISVGYVDDTQFVRFDSDAASPRGEPRAPWVEQEGPEYWDRETQKYKRQAQADRVNLRKLRGCYNQSEDGSHTLQWMYGCDLGPDGRLLRGYDQSAYDGKDYIALNEDLRSWTAADTAAQITQRKWEAAREAEQWRAYLEGTCVEWLRRYLENGKETLQRAEHPKTHVTHHPVSDHEATLRCWALGFYPAEITLTWQRDGEDQTQDTELVETRPCGDGTFQKWAAVVVPSGEEQRYTCHVQHEGLPEPLTLRWEP

SEQ ID NO: 363 - protein, 276 aa, Artificial sequence
  synthetic sequence
CSHSMRYFYTAVSRPGRGEPRFIAVGYVDDTQFVQFDSDAASPRGEPRAPWVEQEGPEYWDRETQKYKRQAQTDRVSLRNLRGCYNQSEAGSHTLQRMYGCDLGPDGRLLRGYNQFAYDGKDYIALNEDLRSWTAADTAAQITQRKWEAARTAEQLRAYLEGTCVEWLRRYLENGKKTLQRAEHPKTHVTHHPVSDHEATLRCWALGFYPAEITLTWQRDGEDQTQDTELVETRPCGDGTFQKWAAVVVPSGEEQRYTCHVQHEGLPEPLTLRWGP

SEQ ID NO: 364 - protein, 276 aa, Artificial sequence
  synthetic sequence
CSHSMRYFYTAVSRPGRGEPHFIAVGYVDDTQFVRFDSDAASPRGEPRAPWVEQEGPEYWDRETQNYKRQAQTDRVNLRKLRGCYNQSEAGSHIIQRMYGCDLGPDGRLLRGHDQLAYDGKDYIALNEDLRSWTAADTAAQITQRKWEAAREAEQLRAYLEGTCVEWLRRYLENGKETLQRAEHPKTHVTHHPVSDHEATLRCWALGFYPAEITLTWQRDGEDQTQDTELVETRPCGDGTFQKWAAVVVPSGEEQRYTCHVQHEGLPEPLTLRWEP

SEQ ID NO: 365 - protein, 223 aa, Artificial sequence
  synthetic sequence
PPCPSCPAPEFLGGPSVFLFPPKPKDTLMISRTPEVTCVVVDVSQEDPEVQFNWYVDGVEVHNAKTKPREEQFNSTYRVVSVLTVLHQDWLNGKEYKCKVSNKGLPSSIEKTISKAKGQPREPQVYTLPPSQEEMTKNQVSLTCLVKGFYPSDIAVEWESNGQPENNYKTTPPVLDSDGSFFLYSRLTVDKSRWQEGNVFSCSVMHEALHNHYTQKSLSLSPG

SEQ ID NO: 366 - protein, 7 aa, Artificial sequence
  synthetic sequence
  MISC_FEATURE (1)..(2): The amino acids from positions 1 to 2 may be repeated at least once
  MISC_FEATURE (3)..(7): The amino acids at positions 3 to 7 may be repeated at least once
GSGSGGS

SEQ ID NO: 367 - protein, 4 aa, Artificial sequence
  synthetic sequence
  MISC_FEATURE (1)..(4): The amino acids at positions 1 to 4 may be repeated at least once
GGGS

SEQ ID NO: 368 - protein, 4 aa, Artificial sequence
  synthetic sequence
GGSG

SEQ ID NO: 369 - protein, 5 aa, Artificial sequence
  synthetic sequence
GGSGG

SEQ ID NO: 370 - protein, 5 aa, Artificial sequence
  synthetic sequence
GSGSG

SEQ ID NO: 371 - protein, 5 aa, Artificial sequence
  synthetic sequence
GSGGG

SEQ ID NO: 372 - protein, 5 aa, Artificial sequence
  synthetic sequence
GGGSG

SEQ ID NO: 373 - protein, 5 aa, Artificial sequence
  synthetic sequence
GSSSG

SEQ ID NO: 374 - protein, 5 aa, Artificial sequence
  synthetic sequence
GSSSS

SEQ ID NO: 375 - protein, 20 aa, Artificial sequence
  synthetic sequence
GSSSSGSSSSGSSSSGSSSS

SEQ ID NO: 376 - protein, 25 aa, Artificial sequence
  synthetic sequence
GSSSSGSSSSGSSSSGSSSSGSSSS

SEQ ID NO: 377 - protein, 5 aa, Artificial sequence
  synthetic sequence
GGGGS

SEQ ID NO: 378 - protein, 10 aa, Artificial sequence
  synthetic sequence
GGGGSGGGGS

SEQ ID NO: 379 - protein, 15 aa, Artificial sequence
  synthetic sequence
GGGGSGGGGSGGGGS

SEQ ID NO: 380 - protein, 20 aa, Artificial sequence
  synthetic sequence
GGGGSGGGGSGGGGSGGGGS

SEQ ID NO: 381 - protein, 25 aa, Artificial sequence
  synthetic sequence
GGGGSGGGGSGGGGSGGGGSGGGGS

SEQ ID NO: 382 - protein, 30 aa, Artificial sequence
  synthetic sequence
GGGGSGGGGSGGGGSGGGGSGGGGSGGGGS

SEQ ID NO: 383 - protein, 35 aa, Artificial sequence
  synthetic sequence
GGGGSGGGGSGGGGSGGGGSGGGGSGGGGSGGGGS

SEQ ID NO: 384 - protein, 40 aa, Artificial sequence
  synthetic sequence
GGGGSGGGGSGGGGSGGGGSGGGGSGGGGSGGGGSGGGGS

SEQ ID NO: 385 - protein, 45 aa, Artificial sequence
  synthetic sequence
GGGGSGGGGSGGGGSGGGGSGGGGSGGGGSGGGGSGGGGSGGGGS

SEQ ID NO: 386 - protein, 50 aa, Artificial sequence
  synthetic sequence
GGGGSGGGGSGGGGSGGGGSGGGGSGGGGSGGGGSGGGGSGGGGSGGGGS

SEQ ID NO: 387 - protein, 5 aa, Artificial sequence
  synthetic sequence
AAAGG

SEQ ID NO: 388 - protein, 8 aa, Artificial sequence
  synthetic sequence
LEVLFQGP

SEQ ID NO: 389 - protein, 7 aa, Artificial sequence
  synthetic sequence
ENLYTQS

SEQ ID NO: 390 - protein, 5 aa, Artificial sequence
  synthetic sequence
DDDDK

SEQ ID NO: 391 - protein, 4 aa, Artificial sequence
  synthetic sequence
LVPR

SEQ ID NO: 392 - protein, 22 aa, Artificial sequence
  synthetic sequence
GSGATNFSLLKQAGDVEENPGP

SEQ ID NO: 393 - protein, 9 aa, Artificial sequence
  synthetic sequence
  MISC_FEATURE (6)..(10): The amino acids from positions 6 to 10 may be repeated 1, 2, or 3 times.
GCGGGGGGS

SEQ ID NO: 394 - protein, 6 aa, Artificial sequence
  synthetic sequence
CHYSEL

SEQ ID NO: 395 - protein, 9 aa, Artificial sequence
  synthetic sequence
GILGFVFTL

SEQ ID NO: 396 - protein, 9 aa, Artificial sequence
  synthetic sequence
HPVGEADYF

SEQ ID NO: 397 - protein, 276 aa, Artificial sequence
  synthetic sequence
CSHSMRYFDTAVSRPGRGEPRFISVGYVDDTQFVRFDSDAASPRGEPRAPWVEQEGPEYWDRETQNYKRQAQADRVSLRNLRGCYNQSEDGSHTLQRMYGCDLGPDGRLLRGYDQSAYDGKDYIALNEDLRSWTAADTCAQITQRKLEAARAAEQLRAYLEGTCVEWLRRYLENGKETLQRAEPPKTHVTHHPLSDHEATLRCWALGFYPAEITLTWQRDGEDQTQDTELVETRPAGDGTFQKWAAVVVPSGQEQRYTCHMQHEGLQEPLTLSWEP

SEQ ID NO: 398 - protein, 10 aa, Artificial sequence
  synthetic sequence
GCGGSGGGGS

SEQ ID NO: 399 - protein, 7 aa, Homo sapiens
  misc_feature (1)..(7): Xaa can be any naturally occurring amino acid
XXXXXXX

SEQ ID NO: 400 - protein, 7 aa, Homo sapiens
  misc_feature (1)..(7): Xaa can be any naturally occurring amino acid
XXXXXXX

SEQ ID NO: 401 - protein, 7 aa, Homo sapiens
  misc_feature (1)..(7): Xaa can be any naturally occurring amino acid
XXXXXXX

SEQ ID NO: 402 - protein, 7 aa, Homo sapiens
  misc_feature (1)..(7): Xaa can be any naturally occurring amino acid
XXXXXXX

SEQ ID NO: 403 - protein, 7 aa, Homo sapiens
  misc_feature (1)..(7): Xaa can be any naturally occurring amino acid
XXXXXXX

SEQ ID NO: 404 - protein, 276 aa, Artificial sequence
  synthetic sequence
CSHSMRYFDTAVSRPGRGEPRFISVGYVDDTQFVRFDSDAASPRGEPRAPWVEQEGPEYWDRETQKYKRQAQADRVSLRNLRGCYNQSEDGSHTLQRMSGCDLGPDGRLLRGYDQSAYDGKDYIALNEDLRSWTAADTAAQITQRKLEAARAAEQLRAYLEGTCVEWLRRYLENGKETLQRAEPPKTHVTHHPLSDHEATLRCWALGFYPAEITLTWQRDGEDQTQDTELVETRPCGDGTFQKWAAVVVPSGQEQRYTCHMQHEGLQEPLTLSWEP

SEQ ID NO: 405 - protein, 7 aa, Artificial sequence
  synthetic sequence
  misc_feature (1)..(7): Xaa can be any naturally occurring amino acid
XXXXXXX

SEQ ID NO: 406 - protein, 7 aa, Artificial sequence
  synthetic sequence
  misc_feature (1)..(7): Xaa can be any naturally occurring amino acid
XXXXXXX

SEQ ID NO: 407 - protein, 7 aa, Artificial sequence
  synthetic sequence
  misc_feature (1)..(7): Xaa can be any naturally occurring amino acid
XXXXXXX

SEQ ID NO: 408 - protein, 7 aa, Artificial sequence
  synthetic sequence
  misc_feature (1)..(7): Xaa can be any naturally occurring amino acid
XXXXXXX

SEQ ID NO: 409 - protein, 7 aa, Artificial sequence
  synthetic sequence
  misc_feature (1)..(7): Xaa can be any naturally occurring amino acid
XXXXXXX

SEQ ID NO: 410 - protein, 7 aa, Homo sapiens
  misc_feature (1)..(7): Xaa can be any naturally occurring amino acid
XXXXXXX

SEQ ID NO: 411 - protein, 7 aa, Homo sapiens
  misc_feature (1)..(7): Xaa can be any naturally occurring amino acid
XXXXXXX

SEQ ID NO: 412 - protein, 7 aa, Homo sapiens
  misc_feature (1)..(7): Xaa can be any naturally occurring amino acid
XXXXXXX

SEQ ID NO: 413 - protein, 7 aa, Homo sapiens
  misc_feature (1)..(7): Xaa can be any naturally occurring amino acid
XXXXXXX

SEQ ID NO: 414 - protein, 7 aa, Homo sapiens
  misc_feature (1)..(7): Xaa can be any naturally occurring amino acid
XXXXXXX

SEQ ID NO: 415 - protein, 7 aa, Homo sapiens
  misc_feature (1)..(7): Xaa can be any naturally occurring amino acid
XXXXXXX

SEQ ID NO: 416 - protein, 7 aa, Homo sapiens
  misc_feature (1)..(7): Xaa can be any naturally occurring amino acid
XXXXXXX

SEQ ID NO: 417 - protein, 7 aa, Homo sapiens
  misc_feature (1)..(7): Xaa can be any naturally occurring amino acid
XXXXXXX

SEQ ID NO: 418 - protein, 7 aa, Homo sapiens
  misc_feature (1)..(7): Xaa can be any naturally occurring amino acid
XXXXXXX

SEQ ID NO: 419 - protein, 7 aa, Artificial sequence
  synthetic sequence
  misc_feature (1)..(7): Xaa can be any naturally occurring amino acid
XXXXXXX

SEQ ID NO: 420 - protein, 7 aa, Artificial sequence
  synthetic sequence
  misc_feature (1)..(7): Xaa can be any naturally occurring amino acid
XXXXXXX

SEQ ID NO: 421 - protein, 7 aa, Artificial sequence
  synthetic sequence
  misc_feature (1)..(7): Xaa can be any naturally occurring amino acid
XXXXXXX

SEQ ID NO: 422 - protein, 7 aa, Artificial sequence
  synthetic sequence
  misc_feature (1)..(7): Xaa can be any naturally occurring amino acid
XXXXXXX

SEQ ID NO: 423 - protein, 7 aa, Artificial sequence
  synthetic sequence
  misc_feature (1)..(7): Xaa can be any naturally occurring amino acid
XXXXXXX

SEQ ID NO: 424 - protein, 7 aa, Artificial sequence
  synthetic sequence
  misc_feature (1)..(7): Xaa can be any naturally occurring amino acid
XXXXXXX

SEQ ID NO: 425 - protein, 7 aa, Artificial sequence
  synthetic sequence
  misc_feature (1)..(7): Xaa can be any naturally occurring amino acid
XXXXXXX

SEQ ID NO: 426 - protein, 7 aa, Artificial sequence
  synthetic sequence
  misc_feature (1)..(7): Xaa can be any naturally occurring amino acid
XXXXXXX

SEQ ID NO: 427 - protein, 7 aa, Artificial sequence
  synthetic sequence
  misc_feature (1)..(7): Xaa can be any naturally occurring amino acid
XXXXXXX

SEQ ID NO: 428 - protein, 7 aa, Artificial sequence
  synthetic sequence
  misc_feature (1)..(7): Xaa can be any naturally occurring amino acid
XXXXXXX

SEQ ID NO: 429 - protein, 7 aa, Artificial sequence
  synthetic sequence
  misc_feature (1)..(7): Xaa can be any naturally occurring amino acid
XXXXXXX

SEQ ID NO: 430 - protein, 7 aa, Artificial sequence
  synthetic sequence
  misc_feature (1)..(7): Xaa can be any naturally occurring amino acid
XXXXXXX

SEQ ID NO: 431 - protein, 7 aa, Artificial sequence
  synthetic sequence
  misc_feature (1)..(7): Xaa can be any naturally occurring amino acid
XXXXXXX

SEQ ID NO: 432 - protein, 7 aa, Artificial sequence
  synthetic sequence
  misc_feature (1)..(7): Xaa can be any naturally occurring amino acid
XXXXXXX

SEQ ID NO: 433 - protein, 7 aa, Artificial sequence
  synthetic sequence
  misc_feature (1)..(7): Xaa can be any naturally occurring amino acid
XXXXXXX

SEQ ID NO: 434 - protein, 7 aa, Artificial sequence
  synthetic sequence
  misc_feature (1)..(7): Xaa can be any naturally occurring amino acid
XXXXXXX

SEQ ID NO: 435 - protein, 7 aa, Artificial sequence
  synthetic sequence
  misc_feature (1)..(7): Xaa can be any naturally occurring amino acid
XXXXXXX

SEQ ID NO: 436 - protein, 7 aa, Artificial sequence
  synthetic sequence
  misc_feature (1)..(7): Xaa can be any naturally occurring amino acid
XXXXXXX

SEQ ID NO: 437 - protein, 7 aa, Artificial sequence
  synthetic sequence
  misc_feature (1)..(7): Xaa can be any naturally occurring amino acid
XXXXXXX

SEQ ID NO: 438 - protein, 7 aa, Artificial sequence
  synthetic sequence
  misc_feature (1)..(7): Xaa can be any naturally occurring amino acid
XXXXXXX

SEQ ID NO: 439 - protein, 7 aa, Artificial sequence
  synthetic sequence
  misc_feature (1)..(7): Xaa can be any naturally occurring amino acid
XXXXXXX

SEQ ID NO: 440 - protein, 7 aa, Artificial sequence
  synthetic sequence
  misc_feature (1)..(7): Xaa can be any naturally occurring amino acid
XXXXXXX

SEQ ID NO: 441 - protein, 7 aa, Artificial sequence
  synthetic sequence
  misc_feature (1)..(7): Xaa can be any naturally occurring amino acid
XXXXXXX

SEQ ID NO: 442 - protein, 7 aa, Artificial sequence
  synthetic sequence
  misc_feature (1)..(7): Xaa can be any naturally occurring amino acid
XXXXXXX

SEQ ID NO: 443 - protein, 7 aa, Artificial sequence
  synthetic sequence
  misc_feature (1)..(7): Xaa can be any naturally occurring amino acid
XXXXXXX

SEQ ID NO: 444 - protein, 7 aa, Artificial sequence
  synthetic sequence
  misc_feature (1)..(7): Xaa can be any naturally occurring amino acid
XXXXXXX

SEQ ID NO: 445 - protein, 7 aa, Artificial sequence
  synthetic sequence
  misc_feature (1)..(7): Xaa can be any naturally occurring amino acid
XXXXXXX

SEQ ID NO: 446 - protein, 7 aa, Artificial sequence
  synthetic sequence
  misc_feature (1)..(7): Xaa can be any naturally occurring amino acid
XXXXXXX

SEQ ID NO: 447 - protein, 7 aa, Artificial sequence
  synthetic sequence
  misc_feature (1)..(7): Xaa can be any naturally occurring amino acid
XXXXXXX

SEQ ID NO: 448 - protein, 7 aa, Artificial sequence
  synthetic sequence
  misc_feature (1)..(7): Xaa can be any naturally occurring amino acid
XXXXXXX

SEQ ID NO: 449 - protein, 227 aa, Artificial sequence
  synthetic sequences
DKTHTCPPCPAPELLGGPSVFLFPPKPKDTLMISRTPEVTCVVVDVSHEDPEVKFNWYVDGVEVHNAKTKPREEQYNSTYRVVSVLTVLHQDWLNGKEYKCKVSNKALPAPIEKTISKAKGQPREPQVYTLPPSRDELTKNQVSLTCLVKGFYPSDIAVEWESNGQPENNYKTTPPVLDSDGSFFLYSKLTVDKSRWQQGNVFSCSVMHEALHNHYTQKSLSLSPGK

SEQ ID NO: 450 - protein, 325 aa, Artificial sequence
  synthetic sequences
STKGPSVFPLAPCSRSTSESTAALGCLVKDYFPEPVTVSWNSGALTSGVHTFPAVLQSSGLYSLSSVVTVPSSNFGTQTYTCNVDHKPSNTKVDKTVERKCCVECPPCPAPPVAGPSVFLFPPKPKDTLMISRTPEVTCVVVDVSHEDPEVQFNWYVDGVEVHNAKTKPREEQFNSTFRVVSVLTVVHQDWLNGKEYKCKVSNKGLPAPIEKTISKTKGQPREPQVYTLPPSREEMTKNQVSLTCLVKGFYPSDIAVEWESNGQPENNYKTTPPMLDSDGSFFLYSKLTVDKSRWQQGNVFSCSVMHEALHNHYTQKSLSLSPGK

SEQ ID NO: 451 - protein, 246 aa, Artificial sequence
  synthetic sequences
HKPSNTKVDKRVELKTPLGDTTHTCPPCPAPELLGGPSVFLFPPKPKDTLMISRTPEVTCVVVDVSHEDPEVKFNWYVDGVEVHNAKTKPREEQYNSTYRVVSVLTVLHQDWLNGKEYKCKVSNKALPAPIEKTISKAKGQPREPQVYTLPPSRDELTKNQVSLTCLVKGFYPSDIAVEWESNGQPENNYKTTPPVLDSDGSFFLYSKLTVDKSRWQQGNVFSCSVMHEALHNHYTQKSLSLSPGK

SEQ ID NO: 452 - protein, 383 aa, Artificial sequence
  synthetic sequences
PTKAPDVFPIISGCRHPKDNSPVVLACLITGYHPTSVTVTWYMGTQSQPQRTFPEIQRRDSYYMTSSQLSTPLQQWRQGEYKCVVQHTASKSKKEIFRWPESPKAQASSVPTAQPQAEGSLAKATTAPATTRNTGRGGEEKKKEKEKEEQEERETKTPECPSHTQPLGVYLLTPAVQDLWLRDKATFTCFVVGSDLKDAHLTWEVAGKVPTGGVEEGLLERHSNGSQSQHSRLTLPRSLWNAGTSVTCTLNHPSLPPQRLMALREPAAQAPVKLSLNLLASSDPPEAASWLLCEVSGFSPPNILLMWLEDQREVNTSGFAPARPPPQPRSTTFWAWSVLRVPAPPSPQPATYTCVVSHEDSRTLLNASRSLEVSYVTDHGPMK

SEQ ID NO: 453 - protein, 276 aa, Artificial sequence
  synthetic sequences
VTSTLTIKZSDWLGESMFTCRVDHRGLTFQQNASSMCVPDQDTAIRVFAIPPSFASIFLTKSTKLTCLVTDLTTYBSVTISWTREENGAVKTHTNISESHPNATFSAVGEASICEDBDWSGERFTCTVTHTDLPSPLKQTISRPKGVALHRPBVYLLPPARZZLNLRESATITCLVTGFSPADVFVEWMQRGEPLSPQKYVTSAPMPEPQAPGRYFAHSILTVSEEEWNTGGTYTCVVAHEALPNRVTERTVDKSTGKPTLYNVSLVMSDTAGTCY

SEQ ID NO: 454 - protein, 353 aa, Artificial sequence
  synthetic sequences
ASPTSPKVFPLSLCSTQPDGNVVIACLVQGFFPQEPLSVTWSESGQGVTARNFPPSQDASGDLYTTSSQLTLPATQCLAGKSVTCHVKHYTNPSQDVTVPCPVPSTPPTPSPSTPPTPSPSCCHPRLSLHRPALEDLLLGSEANLTCTLTGLRDASGVTFTWTPSSGKSAVQGPPERDLCGCYSVSSVLPGCAEPWNHGKTFTCTAAYPESKTPLTATLSKSGNTFRPEVHLLPPPSEELALNELVTLTCLARGFSPKDVLVRWLQGSQELPREKYLTWASRQEPSQGTTTFAVTSILRVAAEDWKKGDTFSCMVGHEALPLAFTQKTIDRLAGKPTHVNVSVVMAEVDGTCY

SEQ ID NO: 455 - protein, 222 aa, Artificial sequence
  synthetic sequences
ADPCDSNPRGVSAYLSRPSPFDLFIRKSPTITCLVVDLAPSKGTVNLTWSRASGKPVNHSTRKEEKQRNGTLTVTSTLPVGTRDWIEGETYQCRVTHPHLPRALMRSTTKTSGPRAAPEVYAFATPEWPGSRDKRTLACLIQNFMPEDISVQWLHNEVQLPDARHSTTQPRKTKGSGFFVFSRLEVTRAEWEQKDEFICRAVHEAASPSQTVQRAVSVNPGK

SEQ ID NO: 456 - protein, 327 aa, Artificial sequence
  synthetic sequences
ASTKGPSVFPLAPCSRSTSESTAALGCLVKDYFPEPVTVSWNSGALTSGVHTFPAVLQSSGLYSLSSVVTVPSSSLGTKTYTCNVDHKPSNTKVDKRVESKYGPPCPSCPAPEFLGGPSVFLFPPKPKDTLMISRTPEVTCVVVDVSQEDPEVQFNWYVDGVEVHNAKTKPREEQFNSTYRVVSVLTVLHQDWLNGKEYKCKVSNKGLPSSIEKTISKAKGQPREPQVYTLPPSQEEMTKNQVSLTCLVKGFYPSDIAVEWESNGQPENNYKTTPPVLDSDGSFFLYSRLTVDKSRWQEGNVFSCSVMHEALHNHYTQKSLSLSLGK

SEQ ID NO: 457 - protein, 227 aa, Artificial sequence
  synthetic sequences
DKTHTCPPCPAPELLGGPSVFLFPPKPKDTLMISRTPEVTCVVVDVSHEDPEVKFNWYVDGVEVHNAKTKPREEQYNSTYRVVSVLTVLHQDWLNGKEYKCKVSNKALPAPIEKTISKAKGQPREPQVYTLPPSREEMTKNQVSLTCLVKGFYPSDIAVEWESNGQPENNYKTTPPVLDSDGSFFLYSKLTVDKSRWQQGNVFSCSVMHEALHNHYTQKSLSLSPGK

SEQ ID NO: 458 - protein, 227 aa, Artificial sequence
  synthetic sequences
DKTHTCPPCPAPEFEGGPSVFLFPPKPKDTLMISRTPEVTCVVVDVSHEDPEVKFNWYVDGVEVHNAKTKPREEQYNSTYRVVSVLTVLHQDWLNGKEYKCKVSNKALPASIEKTISKAKGQPREPQVYTLPPSREEMTKNQVSLTCLVKGFYPSDIAVEWESNGQPENNYKTTPPVLDSDGSFFLYSKLTVDKSRWQQGNVFSCSVMHEALHNHYTQKSLSLSPGK

SEQ ID NO: 459 - protein, 227 aa, Artificial sequence
  synthetic sequences
DKTHTCPPCPAPELLGGPSVFLFPPKPKDTLMISRTPEVTCVVVDVSHEDPEVKFNWYVDGVEVHNAKTKPREEQYASTYRVVSVLTVLHQDWLNGKEYKCKVSNKALPAPIEKTISKAKGQPREPQVYTLPPSREEMTKNQVSLTCLVKGFYPSDIAVEWESNGQPENNYKTTPPVLDSDGSFFLYSKLTVDKSRWQQGNVFSCSVMHEALHNHYTQKSLSLSPGK

SEQ ID NO: 460 - protein, 227 aa, Artificial sequence
  synthetic sequences
DKTHTCPPCPAPEAAGGPSVFLFPPKPKDTLMISRTPEVTCVVVDVSHEDPEVKFNWYVDGVEVHNAKTKPREEQYNSTYRVVSVLTVLHQDWLNGKEYKCKVSNKALPAPIEKTISKAKGQPREPQVYTLPPSREEMTKNQVSLTCLVKGFYPSDIAVEWESNGQPENNYKTTPPVLDSDGSFFLYSKLTVDKSRWQQGNVFSCSVMHEALHNHYTQKSLSLSPGK

SEQ ID NO: 461 - protein, 275 aa, Artificial sequence [sequence omitted]

SEQ ID NO: 462 - protein, 275 aa, Artificial sequence; identical to SEQ ID NO: 46
  synthetic sequences

What is claimed is:

1. A T-cell modulatory multimeric polypeptide comprising:
at least one heterodimer comprising:
a) a first polypeptide comprising:
i) a peptide epitope, wherein the peptide has a length of at least 4 amino acids; and
ii) first major histocompatibility complex (MHC) polypeptide;
b) a second polypeptide comprising a second MHC polypeptide, and
c) at least one immunomodulatory polypeptide,
wherein the first and/or the second polypeptide comprises the immunomodulatory polypeptide.

2. A T-cell modulatory multimeric polypeptide of claim 1, wherein at least one of the at least one immunomodulatory polypeptide is a variant immunomodulatory polypeptide that exhibits reduced affinity to a cognate co-immunomodulatory polypeptide compared to the affinity of a corresponding wild-type immunomodulatory polypeptide for the cognate co-immunomodulatory polypeptide,
and wherein the epitope binds to a T-cell receptor (TCR) on a T cell with an affinity of at least 10⁻⁷ M,
such that:
i) the T-cell modulatory multimeric polypeptide binds to a first T cell with an affinity that is at least 25% higher than the affinity with which the T-cell modulatory multimeric polypeptide binds a second T cell,
wherein the first T cell expresses on its surface the cognate co-immunomodulatory polypeptide and a TCR that binds the epitope with an affinity of at least 10⁻⁷ M, and
wherein the second T cell expresses on its surface the cognate co-immunomodulatory polypeptide but does not express on its surface a TCR that binds the epitope with an affinity of at least 10⁻⁷ M; and/or
ii) the ratio of the binding affinity of a control T-cell modulatory multimeric polypeptide, wherein the control comprises a wild-type immunomodulatory polypeptide, to a cognate co-immunomodulatory polypeptide to the binding affinity of the T-cell modulatory multimeric polypeptide comprising a variant of the wild-type immunomodulatory polypeptide to the cognate co-immunomodulatory polypeptide, when measured by bio-layer interferometry, is in a range of from 1.5:1 to 10⁶:1.

3. A T-cell modulatory multimeric polypeptide of claim 2, wherein:
a) the T-cell modulatory multimeric polypeptide binds to the first T cell with an affinity that is at least 50%, at least 2-fold, at least 5-fold, or at least 10-fold higher than the affinity with which it binds the second T cell; and/or
b) the variant immunomodulatory polypeptide binds the co-immunomodulatory polypeptide with an affinity of from about 10⁻⁴ M to about 10⁻⁷ M, from about 10⁻⁴ M to about 10⁻⁶M, from about 10⁻⁴ M to about 10⁻⁵M; and/or
c) wherein the ratio of the binding affinity of a control T-cell modulatory multimeric polypeptide, wherein the control comprises a wild-type immunomodulatory polypeptide, to a cognate co-immunomodulatory polypeptide to the binding affinity of the T-cell modulatory multimeric polypeptide comprising a variant of the wild-type immunomodulatory polypeptide to the cognate co-immunomodulatory polypeptide, when measured by bio-layer interferometry, is at least 10:1, at least 50:1, at least 10²:1, or at least 10³:1.

4. A T-cell modulatory multimeric polypeptide of any one of claims 1-3, wherein
a1) the first polypeptide comprises, in order from N-terminus to C-terminus:
i) the peptide epitope;
ii) the first MHC polypeptide; and
iii) at least one immunomodulatory polypeptide; and
b1) the second polypeptide comprises, in order from N-terminus to C-terminus:
i) the second MHC polypeptide; and
ii) an immunoglobulin (Ig) Fc polypeptide; or
a2) the first polypeptide comprises, in order from N-terminus to C-terminus:
i) the peptide epitope; and
ii) the first MHC polypeptide; and
b2) the second polypeptide comprises, in order from N-terminus to C-terminus:
i) at least one immunomodulatory polypeptide;
ii) the second MHC polypeptide; and
iii) an Ig Fc polypeptide; or
a3) the first polypeptide comprises, in order from N-terminus to C-terminus:
i) the peptide epitope; and
ii) the first MHC polypeptide; and
b3) the second polypeptide comprises, in order from N-terminus to C-terminus:
i) the second MHC polypeptide; and
ii) an Ig Fc polypeptide; and
iii) at least one immunomodulatory polypeptide; or
a4) the first polypeptide comprises, in order from N-terminus to C-terminus:
i) the peptide epitope; and
ii) the first MHC polypeptide; and
b4) the second polypeptide comprises, in order from N-terminus to C-terminus:
i) the second MHC polypeptide; and
ii) at least one immunomodulatory polypeptide; or
a5) the first polypeptide comprises, in order from N-terminus to C-terminus:
i) the peptide epitope; and
ii) the first MHC polypeptide; and
b5) a second polypeptide comprises, in order from N-terminus to C-terminus:
i) at least one immunomodulatory polypeptide; and
ii) the second MHC polypeptide; or
a6) the first polypeptide comprises, in order from N-terminus to C-terminus:
i) the peptide epitope;
ii) the first MHC polypeptide; and
iii) at least one immunomodulatory polypeptide; and
b6) the second polypeptide comprises:
i) the second MHC polypeptide.

5. A T-cell modulatory multimeric polypeptide of any one of claims 1-4, wherein:
a) the first MHC polypeptide is a β2-microglobulin polypeptide; and the second MHC polypeptide is an MHC class I heavy chain polypeptide; or
b) the first MHC polypeptide is an MHC class I heavy chain polypeptide; and the second MHC polypeptide is a β2-microglobulin polypeptide.

6. A T-cell modulatory multimeric polypeptide of claim 5, wherein:
a) the first polypeptide comprises, in order from N-terminus to C-terminus:
i) the peptide epitope; and
ii) the β2-microglobulin polypeptide; and
b) the second polypeptide comprises, in order from N-terminus to C-terminus:
i) at least one immunomodulatory polypeptide;
ii) the MHC class I heavy chain polypeptide; and
iii) an Ig Fc polypeptide.

7. A T-cell modulatory multimeric polypeptide of claim 5, wherein:
a) the first polypeptide comprises, in order from N-terminus to C-terminus:
i) the peptide epitope; and
ii) the β2-microglobulin polypeptide; and
b) the second polypeptide comprises, in order from N-terminus to C-terminus:
i) the MHC class I heavy chain polypeptide; and
ii) an Ig Fc polypeptide; and
iii) at least one immunomodulatory polypeptide

8. A T-cell modulatory multimeric polypeptide of any one of claims 1-7, wherein the at least one immunomodulatory polypeptide is selected from the group consisting of a cytokine, a 4-1BBL polypeptide, an ICOS-L polypeptide, an OX-40L polypeptide, a CD80 polypeptide, a CD86 polypeptide, a CD40 polypeptide, a CD70 polypeptide, and combinations thereof.

9. A T-cell modulatory multimeric polypeptide of any one of claims 1-8, wherein the at least one immunomodulatory polypeptide is an IL-2 polypeptide.

10. A T-cell modulatory multimeric polypeptide of any one of claims 1-9, wherein the multimeric polypeptide comprises at least two immunomodulatory polypeptides, and wherein at least two of the immunomodulatory polypeptides are the same, optionally wherein the 2 or more immunomodulatory polypeptides are in tandem.

11. A T-cell modulatory multimeric polypeptide of any one of claims 1-10, wherein the immunomodulatory polypeptide is a variant IL-2 polypeptide that exhibits reduced affinity to an IL-2 receptor compared to the affinity of a wild-type IL-2 polypeptide for the IL-2 receptor.

12. A T-cell modulatory multimeric polypeptide of claim 11, wherein the variant IL-2 polypeptide comprises: i) an H16A substitution and an F42A substitution; or ii) an H16T substitution and an F42A substitution.

13. A T-cell modulatory multimeric polypeptide of any one of claims 1-12, wherein the first polypeptide and the second polypeptide are covalently linked to one another, optionally wherein the covalent linkage is via a disulfide bond.

14. A T-cell modulatory multimeric polypeptide of any one of claims 1-13, wherein the first MHC polypeptide or a linker between the epitope and the first MHC polypeptide comprises an amino acid substitution to provide a first Cys residue, wherein the second MHC polypeptide comprises an amino acid substitution to provide a second Cys residue, and wherein the disulfide linkage is between the first and the second Cys residues.

15. The T-cell modulatory multimeric polypeptide of any one of claims 1-14, wherein the polypeptide comprises a disulfide bond between: i) a Cys present in a linker between the peptide epitope and the first MHC class I polypeptide, wherein the first MHC class I polypeptide is a β2M polypeptide; and ii) a Cys residue introduced via a Y84C substitution in the second MHC class I polypeptide, wherein the second MHC class I polypeptide is a MHC Class I heavy chain polypeptide.

16. The T-cell modulatory multimeric polypeptide of any one of claims 1-14, wherein the polypeptide comprises a disulfide bond between i) a Cys residue introduced into the first MHC class I polypeptide via an R12C substitution, wherein the first MHC class I polypeptide is a β2M polypeptide; and ii) a Cys residue introduced into the second MHC class I polypeptide, via an A236C substitution, wherein second MHC class I polypeptide is an MHC Class I heavy chain polypeptide.

17. The T-cell modulatory multimeric polypeptide of any one of claims 1-14, wherein the polypeptide comprises a first disulfide bond between: i) a Cys present in a linker between the peptide epitope and the first MHC class I polypeptide, wherein the first MHC class I polypeptide is a β2M polypeptide; and ii) a Cys residue introduced via a Y84C substitution in the second MHC class I polypeptide, wherein the second MHC class I polypeptide is a MHC Class I heavy chain polypeptide, and a second disulfide bond between i) a Cys residue introduced into the β2M polypeptide via an R12C substitution; and ii) a Cys residue introduced into the MHC Class I heavy chain polypeptide via an A236C substitution.

18. A T-cell modulatory multimeric polypeptide of claim 15 or claim 17, wherein the linker between the peptide epitope and the first MHC is GCGGS(G4S)n (SEQ ID NO:315), where n is 1, 2, 3, 4, 5, 6, 7, 8, or 9.

19. A T-cell modulatory multimeric polypeptide of any one of claims 1-18, wherein the peptide epitope has a length of from about 4 amino acids to about 25 amino acids.

20. A T-cell modulatory multimeric polypeptide of any one of claims 1-19, wherein the peptide epitope is other than a peptide epitope of a human papilloma virus (HPV) antigen, an alpha-feto protein (AFP) antigen, and a Wilms tumor-1 (WT1) antigen.

21. A T-cell modulatory multimeric polypeptide of any one of claims 1-20, wherein the first or the second MHC polypeptide comprises:
a) an amino acid sequence having at least 95% amino acid sequence identity to the HLA-A*0101, HLA-A*0201, HLA-A*0201, HLA-A*1101, HLA-A*2301, HLA-A*2402, HLA-A*2407, HLA-A*3303, or HLA-A*3401 amino acid sequence depicted in FIG. 11A; or
b) an amino acid sequence having at least 95% amino acid sequence identity to the HLA-B*0702, HLA-B*0801, HLA-B*1502, HLA-B*3802, HLA-B*4001, HLA-B*4601, or HLA-B*5301 amino acid sequence depicted in FIG. 12A; or
c) an amino acid sequence having at least 95% amino acid sequence identity to the HLA-C*0102, HLA-C*0303, HLA-C*0304, HLA-C*0401, HLA-C*0602, HLA-C*0701, HLA-C*0702, HLA-C*0801, or HLA-C*1502 depicted in FIG. 13A.

22. A T-cell modulatory multimeric polypeptide of any one of claims 1-20, wherein the first MHC polypeptide is a β2M polypeptide, and wherein the second MHC polypeptide comprises an amino acid sequence having at least 95% amino acid sequence identity to an HLA-A*2402 polypeptide.

23. A T-cell modulatory multimeric polypeptide of any one of claims 1-20, wherein the first MHC polypeptide is a β2M polypeptide, and wherein the second MHC polypeptide comprises an amino acid sequence having at least 95% amino acid sequence identity to an HLA-A*0201 polypeptide.

24. A T-cell modulatory multimeric polypeptide of any one of claims 1-23, wherein the multimeric polypeptide comprises a first and a second heterodimer, and wherein the first and second heterodimers are covalently bound by one or more disulfide bonds between the Ig Fc polypeptides of the first and second heterodimers.

25. A nucleic acid comprising a nucleotide sequence encoding a first or second polypeptide according to any one of claims 1-24.

26. An expression vector comprising the nucleic acid of claim 25.

27. A method of selectively modulating the activity of T cell specific for a peptide epitope, the method comprising contacting the T cell with a T-cell modulatory multimeric polypeptide according to any one of claims 1-24, wherein said contacting selectively modulates the activity of the epitope-specific T cell.

28. A method of treating a patient having a cancer, the method comprising administering to the patient an effective amount of a pharmaceutical composition comprising T-cell modulatory multimeric polypeptide according to any one of claims 1-24.

29. A method of claim 28, further comprising administering one or more checkpoint inhibitors to the individual.

30. A method according to claim 29, wherein the checkpoint inhibitor is an antibody that binds to a polypeptide selected from the group consisting of CD27, CD28, CD40, CD122, CD96, CD73, CD47, OX40, GITR, CSF1R, JAK, PI3K delta, PI3K gamma, TAM, arginase, CD137, ICOS, A2AR, B7-H3, B7-H4, BTLA, CTLA-4, LAG3, TIM3, VISTA, CD96, TIGIT, CD122, PD-1, PD-L1, and PD-L2.

31. A method according to claim 30, wherein the checkpoint inhibitor is an antibody specific for PD-1, PD-L1, or CTLA4.

32. A method according to claim 29, wherein the one or more checkpoint inhibitors is selected from the group consisting of nivolumab, pembrolizumab, pidilizumab, AMP-224, MPDL3280A, MDX-1105, MEDI-4736, arelumab, ipilimumab, tremelimumab, pidilizumab, IMP321, MGA271, BMS-986016, lirilumab, urelumab, PF-05082566, IPH2101, MEDI-6469, CP-870,893, Mogamulizumab, Varlilumab, Avelumab, Galiximab, AMP-514, AUNP 12, Indoximod, NLG-919, INCB024360, KN035, and combinations thereof.

33. A method of modulating an immune response in an individual, the method comprising administering to the individual an effective amount of the T-cell modulatory multimeric polypeptide of any one of claims 1-24,
wherein said administering induces an epitope-specific T cell response and an epitope-non-specific T cell response, and
wherein the ratio of the epitope-specific T cell response to the epitope-non-specific T cell response is at least 2:1.

34. A method of delivering an immunomodulatory polypeptide selectively to a target T cell, the method comprising contacting a mixed population of T cells with a T-cell modulatory multimeric polypeptide of any one of claims 1-24, wherein the mixed population of T cells comprises the target T cell and non-target T cells, wherein the target T cell is specific for the epitope present within the T-cell modulatory multimeric polypeptide, and wherein said contacting delivers the one or more immunomodulatory polypeptides present within the T-cell modulatory multimeric polypeptide to the target T cell.

35. A method of detecting, in a mixed population of T cells obtained from an individual, the presence of a target T cell that binds a peptide epitope, the method comprising:
a) contacting in vitro the mixed population of T cells with the T-cell modulatory multimeric polypeptide of any one of claims 1-24, wherein the T-cell modulatory multimeric polypeptide comprises the peptide epitope; and
b) detecting activation and/or proliferation of T cells in response to said contacting, wherein activated and/or proliferated T cells indicates the presence of the target T cell.
